(19) United States
(12) Patent Application Publication
(10) Pub. No.: US 2013/0129730 A1
(43) Pub. Date: May 23, 2013

(54) CROSS-SPECIES-SPECIFIC PSMAxCD3 BISPECIFIC SINGLE CHAIN ANTIBODY

(71) Applicants: Peter Kufer, Munich (DE); Ralf Lutterbuese, Munich (DE); Matthias Klinger, Munich (DE); Petra Fluhr, Munich (DE); Doris Rau, Munich (DE); Susanne Hausmann, Munich (DE); Carole Steiger, Munich (DE); Tobias Raum, Munich (DE); Patrick Hoffmann, Munich (DE); Roman Kischel, Munich (DE); Evelyne Schaller, Munich (DE); Susanne Mangold, Munich (DE)

(72) Inventors: Peter Kufer, Munich (DE); Ralf Lutterbuese, Munich (DE); Matthias Klinger, Munich (DE); Petra Fluhr, Munich (DE); Doris Rau, Munich (DE); Susanne Hausmann, Munich (DE); Carole Steiger, Munich (DE); Tobias Raum, Munich (DE); Patrick Hoffmann, Munich (DE); Roman Kischel, Munich (DE); Evelyne Schaller, Munich (DE); Susanne Mangold, Munich (DE)

(73) Assignee: Amgen Research (Munich) GmbH

(21) Appl. No.: 13/638,223

(22) PCT Filed: Apr. 1, 2011
(86) PCT No.: PCT/EP2011/055104

§ 371 Date: Jan. 17, 2013

Related U.S. Application Data
(60) Provisional application No. 61/320,052, filed on Apr. 1, 2010.

(51) Int. Cl. C07K 16/46

(52) U.S. Cl. CPC C07K 16/468
USPC 424/135.1; 530/387.3; 536/23.53; 435/320.1; 435/69.6; 435/252.33

(57) ABSTRACT

The present invention relates to a bispecific single chain antibody molecule comprising a first binding domain capable of binding to an epitope of human and non-chimpanzee primate CD3 epsilon chain, wherein the epitope is part of an amino acid sequence comprised in the group consisting of SEQ ID NOs. 2, 4, 6, and 8, and a second binding domain capable of binding to prostate-specific membrane antigen (PSMA). The invention also provides nucleic acids encoding said bispecific single chain antibody molecule as well as vectors and host cells and a process for its production. The invention further relates to pharmaceutical compositions comprising said bispecific single chain antibody molecule and medical uses of said bispecific single chain antibody molecule.

[0001] The present invention relates to a bispecific single chain antibody molecule comprising a first binding domain capable of binding to an epitope of human and non-chimpanzee primate CD3 epsilon chain, wherein the epitope is part of an amino acid sequence comprised in the group consisting of SEQ ID NOs. 2, 4, 6, and 8, and a second binding domain capable of binding to prostate-specific membrane antigen (PSMA). The invention also provides nucleic acids encoding said bispecific single chain antibody molecule as well as vectors and host cells and a process for its production. The invention further relates to pharmaceutical compositions comprising said bispecific single chain antibody molecule and medical uses of said bispecific single chain antibody molecule.

[0002] T cell recognition is mediated by clonotypically distributed alpha beta and gamma delta T cell receptors (TcR) that interact with the peptide-loaded molecules of the peptide MHC (pMHC) (Davis & Bjorkman, Nature 334 (1988), 395-402). The antigen-specific chains of the TcR do not possess signalling domains but instead are coupled to the conserved multisubunit signaling apparatus CD3 (Call, Cell 111 (2002), 967-979, Alarcon, Immunol. Rev. 191 (2003), 38-46, Malissen Immunol. Rev. 191 (2003), 7-27). The mechanism by which TcR ligation is directly communicated to the signalling apparatus remains a fundamental question in T cell biology (Alarcon, loc. cit.; Davis, Cell 110 (2002), 285-287). It seems clear that sustained T cell responses involve coreceptor engagement, TcR oligomerization, and a higher order arrangement of TcR-pMHC complexes in the immunological synapse (Davis & van der Merwe, Curr. Biol. 11 (2001), R289-R291, Davis, Nat. Immunol. 4 (2003), 217-224). However very early TcR signalling occurs in the absence of these events and may involve a ligand-induced conformational change in CD3 epsilon (Alarcon, loc. cit., Davis (2002), loc. cit., Gil, J. Biol. Chem. 276 (2001), 11174-11179, Gil, Cell 109 (2002), 901-912). The epsilon, gamma, delta and zeta subunits of the signaling complex associate with each other to form a CD3 epsilon-gamma heterodimer, a CD3 epsilon-delta □heterodimer, and a CD3 zeta-zeta homodimer (Call, loc. cit.). Various studies have revealed that the CD3 molecules are important for the proper cell surface expression of the alpha beta TcR and normal T cell development (Berkhout, J. Biol. Chem. 263 (1988), 8528-8536, Wang, J. Exp. Med. 188 (1998), 1375-1380, Kappes, Curr. Opin. Immunol. 7 (1995), 441-447). The solution structure of the ectodomain fragments of the mouse CD3 epsilon gamma heterodimer showed that the epsilon gamma subunits are both C2-set Ig domains that interact with each other to form an unusual side-to-side dimer configuration (Sun, Cell 105 (2001), 913-923). Although the cysteine-rich stalk appears to play an important role in driving CD3 dimerization (Su, loc. cit., Borroto, J. Biol. Chem. 273 (1998), 12807-12816), interaction by means of the extracellular domains of CD3 epsilon and CD3 gamma is sufficient for assembly of these proteins with TcR beta (Manolios, Eur. J. Immunol. 24 (1994), 84-92, Manolios & Li, Immunol. Cell Biol. 73 (1995), 532-536). Although still controversial, the dominant stoichiometry of the TcR most likely comprises one alpha beta TcR, one CD3 epsilon gamma heterodimer, one CD3 epsilon delta heterodimer and one CD3 zeta zeta homodimer (Call, loc. cit.). Given the central role of the human CD3 epsilon gamma heterodimer in the immune response, the crystal structure of this complex bound to the therapeutic antibody OKT3 has recently been elucidated (Kjer-Nielsen, PNAS101, (2004), 7675-7680).

[0003] A number of therapeutic strategies modulate T cell immunity by targeting TcR signaling, particularly the anti-human CD3 monoclonal antibodies (mAbs) that are widely used clinically in immunosuppressive regimes. The CD3-specific mouse mAb OKT3 was the first mAb licensed for use in humans (Sgro, Toxicology 105 (1995), 23-29) and is widely used clinically as an immunosuppressive agent in transplantation (Chatenoud, Clin. Transplant 7 (1993), 422-430, Chatenoud, Nat. Rev. Immunol. 3 (2003), 123-132, Kumar, Transplant. Proc. 30 (1998), 1351-1352), type 1 diabetes (Chatenoud (2003), loc. cit.), and psoriasis (Utset, J. Rheumatol. 29 (2002), 1907-1913). Moreover, anti-CD3 mAbs can induce partial T cell signalling and clonal anergy (Smith, J. Exp. Med. 185 (1997), 1413-1422). OKT3 has been described in the literature as a potent T cell mitogen (Van Wauve, J. Immunol. 124 (1980), 2708-18) as well as a potent T cell killer (Wong, Transplantation 50 (1990), 683-9). OKT3 exhibits both of these activities in a time-dependent fashion; following early activation of T cells leading to cytokine release, upon further administration OKT3 later blocks all known T cell functions. It is due to this later blocking of T cell function that OKT3 has found such wide application as an immunosuppressant in therapy regimens for reduction or even abolition of allograft tissue rejection.

[0004] OKT3 reverses allograft tissue rejection most probably by blocking the function of all T cells, which play a major role in acute rejection. OKT3 reacts with and blocks the function of the CD3 complex in the membrane of human T cells, which is associated with the antigen recognition structure of T cells (TCR) and is essential for signal transduction. Which subunit of the TCR/CD3 is bound by OKT3 has been the subject of multiple studies. Though some evidence has pointed to a specificity of OKT3 for the epsilon-subunit of the TCR/CD3 complex (Tunnacliffe, Int. Immunol. 1 (1989), 546-50; Kjer-Nielsen, PNAS 101, (2004), 7675-7680). Further evidence has shown that OKT3 binding of the TCR/CD3 complex requires other subunits of this complex to be present (Salmeron, J. Immunol. 147 (1991), 3047-52).

[0005] Other well known antibodies specific for the CD3 molecule are listed in Tunnacliffe, Int. Immunol. 1 (1989), 546-50. As indicated above, such CD3 specific antibodies are able to induce various T cell responses such as lymphokine production (Von Wussow, J. Immunol. 127 (1981), 1197; Palacious, J. Immunol. 128 (1982), 337), proliferation (Van Wauve, J. Immunol. 124 (1980), 2708-18) and suppressor-T cell induction (Kunicka, in “Lymphocyte Typing II” 1 (1986), 223). That is, depending on the experimental conditions, CD3 specific monoclonal antibody can either inhibit or induce cytotoxicity (Leewenberg, J. Immunol. 134 (1985), 3770; Phillips, J. Immunol. 136 (1986) 1579; Platsoucas, Proc. Natl. Acad. Sci. USA 78 (1981), 4500; Itoh, Cell. Immunol. 108 (1987), 283-96; Mentzer, J. Immunol. 135 (1985), 34; Landegren, J. Exp. Med. 155 (1982), 1579; Choi (2001), Eur. J. Immunol. 31, 94-106; Xu (2000), Cell Immunol. 200, 16-26; Kimball (1995), Transpl. Immunol. 3, 212-221).

[0006] Although many of the CD3 antibodies described in the art have been reported to recognize the CD3 epsilon subunit of the CD3 complex, most of them bind in fact to conformational epitopes and, thus, only recognize CD3 epsilon in the native context of the TCR. Conformational epitopes are characterized by the presence of two or more discrete amino acid residues which are separated in the primary sequence, but come together on the surface of the molecule when the polypeptide folds into the native protein/antigen (Sela, (1969) Science 166, 1365 and Layer, (1990) Cell 61, 553-6). The conformational epitopes bound by CD3 epsilon antibodies described in the art may be separated in two groups. In the major group, said epitopes are being formed by two CD3 subunits, e.g. of the CD3 epsilon chain and the CD3 gamma or CD3 delta chain. For example, it has been found in several studies that the most widely used CD3 epsilon monoclonal antibodies OKT3, WT31, UCHT1, 7D6 and Leu-4 did not bind to cells singly transfected with the CD3-epsilon chain. However, these antibodies stained cells doubly transfected with a combination of CD3 epsilon plus either CD3 gamma or CD3 delta (Tunnacliffe, loc. cit.; Law, Int. Immunol. 14 (2002), 389-400; Salmeron, J. Immunol. 147 (1991), 3047-52; Coulie, Eur. J. Immunol. 21 (1991), 1703-9). In a second smaller group, the conformational epitope is being formed within the CD3 epsilon subunit itself. A member of this group is for instance mAb APA 1/1 which has been raised against denatured CD3 epsilon (Risueno, Blood 106 (2005), 601-8). Taken together, most of the CD3 epsilon antibodies described in the art recognize conformational epitopes located on two or more subunits of CD3. The discrete amino acid residues forming the three-dimensional structure of these epitopes may hereby be located either on the CD3 epsilon subunit itself or on the CD3 epsilon subunit and other CD3 subunits such as CD3 gamma or CD3 delta.

[0007] Another problem with respect to CD3 antibodies is that many CD3 antibodies have been found to be species-specific. Anti-CD3 monoclonal antibodies—as holds true generally for any other monoclonal antibodies—function by way of highly specific recognition of their target molecules. They recognize only a single site, or epitope, on their target CD3 molecule. For example, one of the most widely used and best characterized monoclonal antibodies specific for the CD3 complex is OKT-3. This antibody reacts with chimpanzee CD3 but not with the CD3 homolog of other primates, such as macaques, or with dog CD3 (Sandusky et al., J. Med. Primatol. 15 (1986), 441-451). Similarly, WO2005/118635 or WO2007/033230 describe human monoclonal CD3 epsilon antibodies which react with human CD3 epsilon but not with CD3 epsilon of mouse, rat, rabbit or non-chimpanzee primates such as rhesus monkey, cynomolgus monkey or baboon monkey. The anti-CD3 monoclonal antibody UCHT-1 is also reactive with CD3 from chimpanzee but not with CD3 from macaques (own data). On the other hand, there are also examples of monoclonal antibodies, which recognize macaque antigens, but not their human counterparts. One example of this group is monoclonal antibody FN-18 directed to CD3 from macaques (Uda et al., J. Med. Primatol. 30 (2001), 141-147). Interestingly, it has been found that peripheral lymphocytes from about 12% of cynomolgus monkeys lacked reactivity with anti-rhesus monkey CD3 monoclonal antibody (FN-18) due to a polymorphism of the CD3 antigen in macaques. Uda et al. described a substitution of two amino acids in the CD3 sequence of cynomolgus monkeys, which are not reactive with FN-18 antibodies, as compared to CD3 derived from animals, which are reactive with FN-18 antibodies (Uda et al., J Med. Primatol. 32 (2003), 105-10; Uda et al., J Med. Primatol. 33 (2004), 34-7).

[0008] The discriminatory ability, i.e. the species specificity, inherent not only to CD3 monoclonal antibodies (and fragments thereof), but to monoclonal antibodies in general, is a significant impediment to their development as therapeutic agents for the treatment of human diseases. In order to obtain market approval any new candidate medication must pass through rigorous testing. This testing can be subdivided into preclinical and clinical phases: Whereas the latter—further subdivided into the generally known clinical phases I, II and III—is performed in human patients, the former is performed in animals. The aim of pre-clinical testing is to prove that the drug candidate has the desired activity and most importantly is safe. Only when the safety in animals and possible effectiveness of the drug candidate has been established in preclinical testing this drug candidate will be approved for clinical testing in humans by the respective regulatory authority. Drug candidates can be tested for safety in animals in the following three ways, (i) in a relevant species, i.e. a species where the drug candidates can recognize the ortholog antigens, (ii) in a transgenic animal containing the human antigens and (iii) by use of a surrogate for the drug candidate that can bind the ortholog antigens present in the animal. Limitations of transgenic animals are that this technology is typically limited to rodents. Between rodents and man there are significant differences in the physiology and the safety results cannot be easily extrapolated to humans. The limitations of a surrogate for the drug candidate are the different composition of matter compared to the actual drug candidate and often the animals used are rodents with the limitation as discussed above. Therefore, preclinical data generated in rodents are of limited predictive power with respect to the drug candidate. The approach of choice for safety testing is the use of a relevant species, preferably a lower primate. The limitation now of monoclonal antibodies suitable for therapeutic intervention in man described in the art is that the relevant species are higher primates, in particular chimpanzees. Chimpanzees are considered as endangered species and due to their human-like nature, the use of such animals for drug safety testing has been banned in Europe and is highly restricted elsewhere. CD3 has also been successfully used as a target for bispecific single chain antibodies in order to redirect cytotoxic T cells to pathological cells, resulting in the depletion of the diseased cells from the respective organism (WO 99/54440; WO 04/106380). For example, Bargou et al. (Science 321 (2008):974-7) have recently reported on the clinical activity of a CD19xCD3 bispecific antibody construct called blinatumomab, which has the potential to engage all cytotoxic T cells in human patients for lysis of cancer cells. Doses as low as 0.005 milligrams per square meter per day in non-Hodgkin's lymphoma patients led to an elimination of target cells in blood. Partial and complete tumor regressions were first observed at a dose level of 0.015 milligrams, and all seven patients treated at a dose level of 0.06 milligrams experienced a tumor regression. Blinatumomab also led to clearance of tumor cells from bone marrow and liver. Though this study established clinical proof of concept for the therapeutic potency of the bispecific single chain antibody format in treating blood-cell derived cancer, there is still need for successful concepts for therapies of other cancer types.

[0009] In 2008, an estimated 186,320 men will be newly diagnosed with prostate cancer in the United States and about 28,660 men will die from the disease. The most recent report available on cancer mortality shows that, in 2004, the overall death rate from prostate cancer among American men was 25 per 100,000. In the late 1980s, the widespread adoption of the prostate-specific antigen (PSA) test represented a major improvement in the management of prostate cancer. This test measures the amount of PSA protein in the blood, which is often elevated in patients with prostate cancer. In 1986, the U.S. Food and Drug Administration approved the use of the PSA test to monitor patients with prostate cancer and, in 1994, additionally approved its use as a screening test for this disease. Due to the widespread implementation of PSA testing in the United States, approximately 90 percent of all prostate cancers are currently diagnosed at an early stage, and, consequently, men are surviving longer after diagnosis. However, the results of two ongoing clinical trials, the NCI-sponsored Prostate, Lung, Colorectal, and Ovarian (PLCO) screening trial and the European Study of Screening for Prostate Cancer (ERSPC) will be needed to determine whether PSA screening actually saves lives. Ongoing clinical trials over the past 25 years have investigated the effectiveness of natural and synthetic compounds in the prevention of prostate cancer. For example, the Prostate Cancer Prevention Trial (PCPT), which enrolled nearly 19,000 healthy men, found that finasteride, a drug approved for the treatment of benign prostatic hyperplasia (BPH), which is a noncancerous enlargement of the prostate, reduced the risk of developing prostate cancer by 25 percent. Another trial, the Selenium and Vitamin E Cancer Prevention Trial (SELECT), is studying more than 35,000 men to determine whether daily supplements of selenium and vitamin E can reduce the incidence of prostate cancer in healthy men. Other prostate cancer prevention trials are currently evaluating the protective potential of multivitamins, vitamins C and D, soy, green tea, and lycopene, which is a natural compound found in tomatoes. One study, reported in 2005, showed that specific genes were fused in 60 to 80 percent of the prostate tumors analyzed. This study represents the first observation of non-random gene rearrangements in prostate cancer. This genetic alteration may eventually be used as a biomarker to aid in the diagnosis and, possibly, treatment of this disease. Other studies have shown that genetic variations in a specific region of chromosome 8 can increase a man's risk of developing prostate cancer. These genetic variations account for approximately 25 percent of the prostate cancers that occur in white men. They are the first validated genetic variants that increase the risk of developing prostate cancer and may help scientists better understand the genetic causes of this disease. There is also ongoing research that examines how proteins circulating in a patient's blood can be used to improve the diagnosis of prostate and other cancers. In 2005, scientists identified a group of specific proteins that are produced by a patient's immune system in response to prostate tumors. These proteins, a type of autoantibody, were able to detect the presence of prostate cancer cells in blood specimens with greater than 90 percent accuracy. When used in combination with PSA, these and other blood proteins may eventually be used to reduce the number of false-positive results obtained with PSA testing alone and, therefore, reduce the large number of unnecessary prostate biopsies that are performed each year due to false-positive PSA test results.

[0010] Apart from PSA, several other markers for prostate cancer have been identified, including e.g. the six-transmembrane epithelial antigen of the prostate (STEAP) (Hubert et al., PNAS 96 (1999), 14523-14528), the prostate stem cell antigen (PSCA) (Reiter et al., Proc. Nat. Acad. Sci. 95: 1735-1740, 1998) and the prostate-specific membrane antigen (PSMA; PSM) (Israeli et al., Cancer Res. 53 (1993). PSMA was originally defined by the monoclonal antibody (MAb) 7E11 derived from immunization with a partially purified membrane preparation from the lymph node prostatic adenocarcinoma (LNCaP) cell line (Horoszewicz et al., Anticancer Res. 7 (1987), 927-35). A 2.65-kb cDNA fragment encoding the PSMA protein was cloned and subsequently mapped to chromosome 11p11.2 (Israeli et al., loc. cit.; O'Keefe et al., Biochem. Biophys. Acta 1443 (1998), 113-127). Initial analysis of PSMA demonstrated widespread expression within the cells of the prostatic secretory epithelium. Immunohistochemical staining demonstrated that PSMA was absent to moderately expressed in hyperplastic and benign tissues, while malignant tissues stained with the greatest intensity (Horoszewicz et al., loc. cit.). Subsequent investigations have recapitulated these results and evinced PSMA expression as a universal feature in practically every prostatic tissue examined to date. These reports further demonstrate that expression of PSMA increases precipitously proportional to tumor aggressiveness (Burger et al., Int. J. Cancer 100 (2002), 228-237; Chang et al., Cancer Res. 59 (1999), 3192-98; Chang et al., Urology 57 (2001), 1179-83), Kawakami and Nakayama, Cancer Res. 57 (1997), 2321-24; Liu et al., Cancer Res. 57 (1997), 3629-34; Lopes et al., Cancer Res. 50 (1990), 6423-29; Silver et al., Clin. Cancer Res. 9 (2003), 6357-62; Sweat et al., Urology 52 (1998), 637-40; Troyer et al., Int. J. Cancer 62 (1995), 552-558; Wright et al., Urology 48 (1996), 326-334). Consistent with the correlation between PSMA expression and tumor stage, increased levels of PSMA are associated with androgen-independent prostate cancer (PCa). Analysis of tissue samples from patients with prostate cancer has demonstrated elevated PSMA levels after physical castration or androgen-deprivation therapy. Unlike expression of prostate specific antigen, which is downregulated after androgen ablation, PSMA expression is significantly increased in both primary and metastatic tumor specimens (Kawakami et al., Wright et al., loc. cit.). Consistent with the elevated expression in androgen-independent tumors, PSMA transcription is also known to be downregulated by steroids, and administration of testosterone mediates a dramatic reduction in PSMA protein and mRNA levels (Israeli et al., Cancer Res. 54 (1994), 1807-11; Wright et al., loc. cit.). PSMA is also highly expressed in secondary prostatic tumors and occult metastatic disease. Immunohistochemical analysis has revealed relatively intense and homogeneous expression of PSMA within metastatic lesions localized to lymph nodes, bone, soft tissue, and lungs compared with benign prostatic tissues (Chang et al. (2001), loc. cit.; Murphy et al., Cancer 78 (1996), 809-818; Sweat et al., loc. cit.). Some reports have also indicated limited PSMA expression in extraprostatic tissues, including a subset of renal proximal tubules, some cells of the intestinal brush-border membrane, and rare cells in the colonic crypts (Chang et al. (1999), Horoszewicz et al., Israeli et al. (1994), Lopes et al., Troyer et al., loc. cit.). However, the levels of PSMA in these tissues are generally two to three orders of magnitude less than those observed in the prostate (Sokoloff et al., Prostate 43 (2000), 150-157). PSMA is also expressed in the tumor-associated neovasculature of most solid cancers examined yet is absent in the normal vascular endothelium (Chang et al. (1999), Liu et al., Silver et al., loc. cit.). Although the significance of PSMA expression within the vasculature is unknown, the specificity for tumor-associated endothelium makes PSMA a potential target for the treatment of many forms of malignancy.

[0011] Though there has been put much effort in identifying novel targets for therapeutic approaches for cancer, cancer is yet one of the most frequently diagnosed diseases. In light of this, there is still need for effective treatments for cancer.

[0012] The present invention provides for a bispecific single chain antibody molecule comprising a first binding domain capable of binding to an epitope of human and non-chimpanzee primate CD3ε (epsilon) chain, wherein the epitope is part of an amino acid sequence comprised in the group consisting of SEQ ID NOs. 2, 4, 6, and 8; and a second binding domain capable of binding to prostate-specific membrane antigen (PSMA).

[0013] Though T cell-engaging bispecific single chain antibodies described in the art have great therapeutic potential for the treatment of malignant diseases, most of these bispecific molecules are limited in that they are species specific and recognize only human antigen, and—due to genetic similarity—likely the chimpanzee counterpart. The advantage of the present invention is the provision of a bispecific single chain antibody comprising a binding domain exhibiting cross-species specificity to human and non-chimpanzee primate of the CD3 epsilon chain.

[0014] In the present invention, an N-terminal 1-27 amino acid residue polypeptide fragment of the extracellular domain of CD3 epsilon was surprisingly identified which—in contrast to all other known epitopes of CD3 epsilon described in the art—maintains its three-dimensional structural integrity when taken out of its native environment in the CD3 complex (and optionally fused to a heterologous amino acid sequence such as EpCAM or an immunoglobulin Fc part). The present invention, therefore, provides for a bispecific single chain antibody molecule comprising a first binding domain capable of binding to an epitope of an N-terminal 1-27 amino acid residue polypeptide fragment of the extracellular domain of CD3 epsilon (which CD3 epsilon is, for example, taken out of its native environment and/or comprised by (presented on the surface of) a T-cell) of human and at least one non-chimpanzee primate CD3 epsilon chain, wherein the epitope is part of an amino acid sequence comprised in the group consisting of SEQ ID NOs. 2, 4, 6, and 8; and a second binding domain capable of binding to prostate-specific membrane antigen (PSMA). Preferred non-chimpanzee primates are mentioned herein elsewhere. At least one (or a selection thereof or all) primate(s) selected from Callithrix jacchus; Saguinus oedipus, Saimiri sciureus, and Macaca fascicularis (either SEQ ID 631 or 632 or both), is (are) particularily preferred. Macaca mulatta, also known as Rhesus Monkey is also envisaged as another preferred primate. It is thus envisaged that antibodies of the invention bind to (are capable of binding to) the context independent epitope of an N-terminal 1-27 amino acid residue polypeptide fragment of the extracellular domain of CD3 epsilon of human and Callithrix jacchus, Saguinus oedipus, Saimiri sciureus, and Macaca fascicularis (either SEQ ID 631 or 632 or both), and optionally also to Macaca mulatta. A bispecific single chain antibody molecule comprising a first binding domain as defined herein can be obtained (is obtainable by) or can be manufactured in accordance with the protocol set out in WO 2008/119567 (in particular Example 2 of WO 2008/119567). To this end, it is envisaged to (a) immunize mice with an N-terminal 1-27 amino acid residue polypeptide fragment of the extracellular domain of CD3 epsilon of human and/or Saimiri sciureus; (b) generation of an immune murine antibody scFv library; (c) identification of CD3 epsilon specific binders by testing the capability to bind to at least SEQ ID NOs. 2, 4, 6, and 8.

[0015] The context-independence of the CD3 epitope provided in this invention corresponds to the first 27 N-terminal amino acids of CD3 epsilon or functional fragments of this 27 amino acid stretch. The phrase “context-independent,” as used herein in relation to the CD3 epitope means that binding of the herein described inventive binding molecules/antibody molecules does not lead to a change or modification of the conformation, sequence, or structure surrounding the antigenic determinant or epitope. In contrast, the CD3 epitope recognized by a conventional CD3 binding molecule (e.g. as disclosed in WO 99/54440 or WO 04/106380) is localized on the CD3 epsilon chain C-terminally to the N-terminal 1-27 amino acids of the context-independent epitope, where it only takes the correct conformation if it is embedded within the rest of the epsilon chain and held in the right sterical position by heterodimerization of the epsilon chain with either the CD3 gamma or delta chain. Anti-CD3 binding domains as part of a PSMAxCD3 bispecific single chain molecule as provided herein have been described in WO 2008/119567. These binding domains are generated (and directed) against a context-independent CD3 epitope provide for a surprising clinical improvement with regard to T cell redistribution and, thus, a more favourable safety profile. Without being bound by theory, since the CD3 epitope is context-independent, forming an autonomous selfsufficient subdomain without much influence on the rest of the CD3 complex, the CD3 binding domain of the PSMAxCD3 bispecific single chain molecule provided herein induces less allosteric changes in CD3 conformation than the conventional CD3 binding molecules (like molecules provided in WO 99/54440 or WO 04/106380), which recognize context-dependent CD3 epitopes.

[0016] The context-independence of the CD3 epitope which is recognized by the CD3 binding domain of the PSMAxCD3 bispecific single chain antibody of the invention is associated with less or no T cell redistribution (T cell redistribution equates with an initial episode of drop and subsequent recovery of absolute T cell counts) during the starting phase of treatment with said PSMAxCD3 bispecific single chain antibody of the invention. These results in a better safety profile of the PSMAxCD3 bispecific single chain antibody of the invention compared to conventional CD3 binding molecules known in the art, which recognize context-dependent CD3 epitopes. Particularly, because T cell redistribution during the starting phase of treatment with CD3 binding molecules is a major risk factor for adverse events, like CNS adverse events, the PSMAxCD3 bispecific single chain antibody of the invention by recognizing a context-independent rather than a context-dependent CD3 epitope has a substantial safety advantage over the CD3 binding molecules known in the art. Patients with such CNS adverse events related to T cell redistribution during the starting phase of treatment with conventional CD3 binding molecules usually suffer from confusion and disorientation, in some cases also from urinary incontinence. Confusion is a change in mental status in which the patient is not able to think with his or her usual level of clarity. The patient usually has difficulties to concentrate and thinking is not only blurred and unclear but often significantly slowed down. Patients with CNS adverse events related to T cell redistribution during the starting phase of treatment with conventional CD3 binding molecules may also suffer from loss of memory. Frequently, the confusion leads to the loss of ability to recognize people, places, time or the date. Feelings of disorientation are common in confusion, and the decision-making ability is impaired. CNS adverse events related to T cell redistribution during the starting phase of treatment with conventional CD3 binding molecules may further comprise blurred speech and/or word finding difficulties. This disorder may impair both, the expression and understanding of language as well as reading and writing. Besides urinary incontinence, vertigo and dizziness may also accompany CNS adverse events related to T cell redistribution during the starting phase of treatment with conventional CD3 binding molecules in some patients.

[0017] The maintenance of the three-dimensional structure within the mentioned 27 amino acid N-terminal polypeptide fragment of CD3 epsilon can be used for the generation of, preferably human, binding domains which are capable of binding to the N-terminal CD3 epsilon polypeptide fragment in vitro and to the native (CD3 epsilon subunit of the) CD3 complex on T cells in vivo with the same binding affinity. These data strongly indicate that the N-terminal fragment as described herein forms a tertiary conformation, which is similar to its structure normally existing in vivo. A very sensitive test for the importance of the structural integrity of the amino acids 1-27 of the N-terminal polypeptide fragment of CD3 epsilon was performed. Individual amino acids of amino acids 1-27 of the N-terminal polypeptide fragment of CD3 epsilon were changed to alanine (alanine scanning) to test the sensitivity of the amino acids 1-27 of the N-terminal polypeptide fragment of CD3 epsilon for minor disruptions. The CD3 specific binding domains as part of the PSMAxCD3 bispecific single chain antibody of the invention were used to test for binding to the alanine-mutants of amino acids 1-27 of the N-terminal polypeptide fragment of CD3 epsilon (see WO 2008/119567). Individual exchanges of the first five amino acid residues at the very N-terminal end of the fragment and two of the amino acids at positions 23 and 25 of the amino acids 1-27 of the N-terminal polypeptide fragment of CD3 epsilon were critical for binding of the antibody molecules. The substitution of amino acid residues in the region of position 1-5 comprising the residues Q (Glutamine at position 1), D (Aspartic acid at position 2), G (Glycine at position 3), N (Asparagine at position 4), and E (Glutamic acid at position 5) to Alanine abolished binding of the, preferably human, PSMAxCD3 bispecific single chain antibody of the invention to said fragment. While, for at least some of the, preferably human, PSMAxCD3 bispecific single chain antibody of the invention, two amino acid residues at the C-terminus of the mentioned fragment T (Threonine at position 23) and I (Isoleucine at position 25) reduced the binding energy to the, preferably human, PSMAxCD3 bispecific single chain antibody of the invention.

[0018] Unexpectedly, it has been found that the thus isolated, preferably human, PSMAxCD3 bispecific single chain antibody of the invention not only recognizes the human N-terminal fragment of CD3 epsilon, but also the corresponding homologous fragments of CD3 epsilon of various primates, including New-World Monkeys (Marmoset, Callithrix jacchus; Saguinus oedipus; Saimiri sciureus) and Old-World Monkeys (Macaca fascicularis, also known as Cynomolgus Monkey; or Macaca mulatta, also known as Rhesus Monkey). Thus, multi-primate specificity of the PSMAxCD3 bispecific single chain antibody of the invention was detected. The following sequence analyses confirmed that human and primates share a highly homologous sequence stretch at the N-terminus of the extracellular domain of CD3 epsilon.

[0019] The amino acid sequence of the aformentioned N-terminal fragments of CD3 epsilon are depicted in SEQ ID No. 2 (human), SEQ ID No. 4 (Callithrix jacchus); SEQ ID No. 6 (Saguinus oedipus); SEQ ID No. 8 (Saimiri sciureus); SEQ ID No. 631 QDGNEEMGSITQTPYQVSISGTTILTC or SEQ ID No. 632 QDGNEEMGSITQTPYQVSISGTTVILT (Macaca fascicularis, also known as Cynomolgus Monkey), and SEQ ID No. 633 QDGNEEMGSITQTPYHVSISGTTVILT (Macaca mulatta, also known as Rhesus Monkey).

[0020] The second binding domain of the PSMAxCD3 bispecific single chain antibody of the invention binds to the prostate-specific membrane antigen (PSMA). Preferably, the second binding domain of the PSMAxCD3 bispecific single chain antibody binds to the human PSMA or a non-chimpanzee primate PSMA; more preferred it binds to the human PSMA and a non-chimpanzee primate PSMA and therefore is cross-species specific; even more preferred to the human PSMA and the macaque PSMA (and therefore is cross-species specific as well). Particularly preferred, the macaque PSMA is the Cynomolgus monkey PSMA and/or the Rhesus monkey PSMA. However, it is not excluded from the scope of the present invention, that the second binding domain may also bind to PSMA homologs of other species, such as to the PSMA homolog in rodents.

[0021] Prostate cancer is the second most cancer in men. For 2008, it is estimated that 186,320 men will be newly diagnosed with prostate cancer in the United States and about 28,660 men will die from the disease. Prostate cancer risk is strongly related to age: very few cases are registered in men under 50 and three-quarters of cases occur in men over 65 years. The largest number of cases is diagnosed in those aged 70-74. Currently, the growth rate of the older population is significantly higher than that of the total population. By 2025-2030, projections indicate that the population over 60 will be growing 3.5 times as rapidly as the total population. The proportion of older persons is projected to more than double worldwide over the next half century, which means that a further increase in incidence of diagnosed prostate cancer has to be expected for the future. The highly restricted expression of PSMA and its upregulation in advanced stages and metastatic disease of prostate cancer as well as its role as neoantigen on tumor vasculature of many different types of other solid tumors qualifies PSMA as attractive target antigen for antibody-based cancer therapy. As shown in the following examples, the PSMAxCD3 bispecific single chain antibody of the invention provides an advantageous tool in order to kill PSMA-expressing human cancer cells, as exemplified by the human prostate cancer cell line LNCaP. In addition, the cytotoxic activity of the PSMAxCD3 bispecific single chain antibody of the invention is higher than the cytotoxic activity of antibodies described in the art. Since preferably both the CD3 and the PSMA binding domain of the PSMAxCD3 bispecific single chain antibody of the invention are cross-species specific, i.e. reactive with the human and non-chimpanzee primates antigens, it can be used for preclinical evaluation of safety, activity and/or pharmacokinetic profile of these binding domains in primates and—in the identical form—as drug in humans.

[0022] Advantageously, the present invention provides also PSMAxCD3 bispecific single chain antibodies comprising a second binding domain which binds both to the human PSMA and to the macaque PSMA homolog, i.e. the homolog of a non-chimpanzee primate. In a preferred embodiment, the bispecific single chain antibody thus comprises a second binding domain exhibiting cross-species specificity to the human and a non-chimpanzee primate PSMA. In this case, the identical bispecific single chain antibody molecule can be used both for preclinical evaluation of safety, activity and/or pharmacokinetic profile of these binding domains in primates and as drug in humans. Put in other words, the same molecule can be used in preclinical animal studies as well as in clinical studies in humans. This leads to highly comparable results and a much-increased predictive power of the animal studies compared to species-specific surrogate molecules. Since both the CD3 and the PSMA binding domain of the PSMAxCD3 bispecific single chain antibody of the invention are cross-species specific, i.e. reactive with the human and non-chimpanzee primates' antigens, it can be used both for preclinical evaluation of safety, activity and/or pharmacokinetic profile of these binding domains in primates and—in the identical form—as drug in humans. It will be understood that in a preferred embodiment, the cross-species specificity of the first and second binding domain of the antibodies of the invention is identical.

[0023] It has been found in the present invention that it is possible to generate a, preferably human, PSMAxCD3 bispecific single chain antibody wherein the identical molecule can be used in preclinical animal testing, as well as clinical studies and even in therapy in human. This is due to the unexpected identification of the, preferably human, PSMAxCD3 bispecific single chain antibody, which, in addition to binding to human CD3 epsilon and PSMA, respectively, (and due to genetic similarity likely to the chimpanzee counterpart), also binds to the homologs of said antigens of non-chimpanzee primates, including New-World Monkeys and Old-World Monkeys. As shown in the following Examples, said preferably human, PSMAxCD3 bispecific single chain antibody of the invention can be used as therapeutic agent against various diseases, including, but not limited, to cancer. The PSMAxCD3 bispecific single chain antibody is particularly advantageous for the therapy of cancer, preferably solid tumors, more preferably carcinomas and prostate cancer. In view of the above, the need to construct a surrogate PSMAxCD3 bispecific single chain antibody for testing in a phylogenetic distant (from humans) species disappears. As a result, the identical molecule can be used in animal preclinical testing as is intended to be administered to humans in clinical testing as well as following market approval and therapeutic drug administration. The ability to use the same molecule for preclinical animal testing as in later administration to humans virtually eliminates, or at least greatly reduces, the danger that the data obtained in preclinical animal testing have limited applicability to the human case. In short, obtaining preclinical safety data in animals using the same molecule as will actually be administered to humans does much to ensure the applicability of the data to a human-relevant scenario. In contrast, in conventional approaches using surrogate molecules, said surrogate molecules have to be molecularly adapted to the animal test system used for preclinical safety assessment. Thus, the molecule to be used in human therapy in fact differs in sequence and also likely in structure from the surrogate molecule used in preclinical testing in pharmacokinetic parameters and/or biological activity, with the consequence that data obtained in preclinical animal testing have limited applicability/transferability to the human case. The use of surrogate molecules requires the construction, production, purification and characterization of a completely new construct. This leads to additional development costs and time necessary to obtain that molecule. In sum, surrogates have to be developed separately in addition to the actual drug to be used in human therapy, so that two lines of development for two molecules have to be carried out. Therefore, a major advantage of the, preferably human, PSMAxCD3 bispecific single chain antibody of the invention exhibiting cross-species specificity described herein is that the identical molecule can be used for therapeutic agents in humans and in preclinical animal testing.

[0024] It is preferred that at least one of said first or second binding domains of the bispecific single chain antibody of the invention is CDR-grafted, humanized or human, as set forth in more detail below. Preferably, both the first and second binding domains of the bispecific single chain antibody of the invention are CDR-grafted, humanized or human. For the preferably human, PSMAxCD3 bispecific single chain antibody of the invention, the generation of an immune reaction against said binding molecule is excluded to the maximum possible extent upon administration of the molecule to human patients.

[0025] Another major advantage of the, preferably human, PSMAxCD3 bispecific single chain antibody of the invention is its applicability for preclinical testing in various primates. The behavior of a drug candidate in animals should ideally be indicative of the expected behavior of this drug candidate upon administration to humans. As a result, the data obtained from such preclinical testing should therefore generally have a highly predictive power for the human case. However, as learned from the tragic outcome of the recent Phase I clinical trial on TGN1412 (a CD28 monoclonal antibody), a drug candidate may act differently in a primate species than in humans: Whereas in preclinical testing of said antibody no or only limited adverse effects have been observed in animal studies performed with cynomolgus monkeys, six human patients developed multiple organ failure upon administration of said antibody (Lancet 368 (2006), 2206-7). The results of these dramatic, non-desired negative events suggest that it may not be sufficient to limit preclinical testing to only one (non-chimpanzee primate) species. The fact that the PSMAxCD3 bispecific single chain antibody of the invention binds to a series of New-World and Old-World Monkeys may help to overcome the problems faced in the case mentioned above. Accordingly, the present invention provides means and methods for minimizing species differences in effects when drugs for human therapy are being developed and tested.

[0026] With the, preferably human, cross-species specific PSMAxCD3 bispecific single chain antibody of the invention it is also no longer necessary to adapt the test animal to the drug candidate intended for administration to humans, such as e.g. the creation of transgenic animals. The, preferably human, PSMAxCD3 bispecific single chain antibody of the invention exhibiting cross-species specificity according to the uses and the methods of invention can be directly used for preclinical testing in non-chimpanzee primates, without any genetic manipulation of the animals. As well known to those skilled in the art, approaches in which the test animal is adapted to the drug candidate always bear the risk that the results obtained in the preclinical safety testing are less representative and predictive for humans due to the modification of the animal. For example, in transgenic animals, the proteins encoded by the transgenes are often highly over-expressed. Thus, data obtained for the biological activity of an antibody against this protein antigen may be limited in their predictive value for humans in which the protein is expressed at much lower, more physiological levels.

[0027] A further advantage of the uses of the preferably human PSMAxCD3 bispecific single chain antibody of the invention exhibiting cross-species specificity is the fact that chimpanzees as an endangered species are avoided for animal testing. Chimpanzees are the closest relatives to humans and were recently grouped into the family of hominids based on the genome sequencing data (Wildman et al., PNAS 100 (2003), 7181). Therefore, data obtained with chimpanzee is generally considered to be highly predictive for humans. However, due to their status as endangered species, the number of chimpanzees, which can be used for medical experiments, is highly restricted. As stated above, maintenance of chimpanzees for animal testing is therefore both costly and ethically problematic. The uses of the, preferably human, PSMAxCD3 bispecific single chain antibody of the invention avoid both ethical objections and financial burden during preclinical testing without prejudicing the quality, i.e. applicability, of the animal testing data obtained. In light of this, the uses of the, preferably human, PSMAxCD3 bispecific single chain antibody of the invention provide for a reasonable alternative for studies in chimpanzees.

[0028] A still further advantage of the, preferably human, PSMAxCD3 bispecific single chain antibody of the invention is the ability of extracting multiple blood samples when using it as part of animal preclinical testing, for example in the course of pharmacokinetic animal studies. Multiple blood extractions can be much more readily obtained with a non-chimpanzee primate than with lower animals, e.g. a mouse. The extraction of multiple blood samples allows continuous testing of blood parameters for the determination of the biological effects induced by the, preferably human, PSMAxCD3 bispecific single chain antibody of the invention. Furthermore, the extraction of multiple blood samples enables the researcher to evaluate the pharmacokinetic profile of the, preferably human, PSMAxCD3 bispecific single chain antibody of the invention as defined herein. In addition, potential side effects, which may be induced by said, preferably human, PSMAxCD3 bispecific single chain antibody of the invention reflected in blood parameters can be measured in different blood samples extracted during the course of the administration of said antibody.

[0029] This allows the determination of the potential toxicity profile of the, preferably human, PSMAxCD3 bispecific single chain antibody of the invention as defined herein.

[0030] The advantages of the, preferably human, PSMAxCD3 bispecific single chain antibody of the invention as defined herein exhibiting cross-species specificity may be briefly summarized as follows:

[0031] First, the, preferably human, PSMAxCD3 bispecific single chain antibody of the invention as defined herein used in preclinical testing is the same as the one used in human therapy. Thus, it is no longer necessary to develop two independent molecules, which may differ in their pharmacokinetic properties and biological activity. This is highly advantageous in that e.g. the pharmacokinetic results are more directly transferable and applicable to the human setting than e.g. in conventional surrogate approaches.

[0032] Second, the uses of the, preferably human, PSMAxCD3 bispecific single chain antibody of the invention as defined herein for the preparation of therapeutics in human is less cost- and labor-intensive than surrogate approaches.

[0033] Third, the, preferably human, PSMAxCD3 bispecific single chain antibody of the invention as defined herein can be used for preclinical testing not only in one primate species, but in a series of different primate species, thereby limiting the risk of potential species differences between primates and human.

[0034] Fourth, chimpanzee as an endangered species for animal testing can be avoided if desired.

[0035] Fifth, multiple blood samples can be extracted for extensive pharmacokinetic studies.

[0036] Sixth, due to the human origin of the, preferably human, binding molecules according to a preferred embodiment of the invention, the generation of an immune reaction against said binding molecules is minimalized when administered to human patients. Induction of an immune response with antibodies specific for a drug candidate derived from a non-human species as e.g. a mouse leading to the development of human-anti-mouse antibodies (HAMAs) against therapeutic molecules of murine origin is excluded.

[0037] Last but not least, the therapeutic use of the PSMAxCD3 bispecific single chain antibody of the invention provides a novel and inventive therapeutic approach for cancer, preferably solid tumors, more preferably carcinomas and prostate cancer. As shown in the following examples, the PSMAxCD3 bispecific single chain antibody of the invention provides an advantageous tool in order to kill PSMA-expressing human prostate cancer cells. Moreover, the cytotoxic activity of the PSMAxCD3 bispecific single chain antibody of the invention is higher than the activity of antibodies described in the art.

[0038] As noted herein above, the present invention provides polypeptides, i.e. bispecific single chain antibodies, comprising a first binding domain capable of binding to an epitope of human and non-chimpanzee primate CD3ε chain and a second binding domain capable of binding to PSMA. The second binding domain preferably binds to human PSMA and a non-chimpanzee primate PSMA. The advantage of bispecific single chain antibody molecules as drug candidates fulfilling the requirements of the preferred bispecific single chain antibody of the invention is the use of such molecules in preclinical animal testing as well as in clinical studies and even for therapy in human. In a preferred embodiment of the cross-species specific bispecific single chain antibodies of the invention the second binding domain binding to PSMA is human. In a cross-species specific bispecific molecule according to the invention the binding domain binding to an epitope of human and non-chimpanzee primate CD3 epsilon chain is located in the order VH-VL or VL-VH at the N-terminus or the C-terminus of the bispecific molecule. Examples for cross-species specific bispecific molecules according to the invention in different arrangements of the VH- and the VL-chain in the first and the second binding domain are described in the appended examples.

[0039] As used herein, a “bispecific single chain antibody” denotes a single polypeptide chain comprising two binding domains. Each binding domain comprises one variable region from an antibody heavy chain (“VH region”), wherein the VH region of the first binding domain specifically binds to the CD3ε molecule, and the VH region of the second binding domain specifically binds to PSMA. The two binding domains are optionally linked to one another by a short polypeptide spacer. A non-limiting example for a polypeptide spacer is Gly-Gly-Gly-Gly-Ser (G-G-G-G-S) and repeats thereof. Each binding domain may additionally comprise one variable region from an antibody light chain (“VL region”), the VH region and VL region within each of the first and second binding domains being linked to one another via a polypeptide linker, for example of the type disclosed and claimed in EP 623679 B1, but in any case long enough to allow the VH region and VL region of the first binding domain and the VH region and VL region of the second binding domain to pair with one another such that, together, they are able to specifically bind to the respective first and second binding domains.

[0040] The term “protein” is well known in the art and describes biological compounds. Proteins comprise one or more amino acid chains (polypeptides), whereby the amino acids are bound among one another via a peptide bond. The term “polypeptide” as used herein describes a group of molecules, which consists of more than 30 amino acids. In accordance with the invention, the group of polypeptides comprises “proteins” as long as the proteins consist of a single polypeptide chain. Also in line with the definition the term “polypeptide” describes fragments of proteins as long as these fragments consist of more than 30 amino acids. Polypeptides may further form multimers such as dimers, trimers and higher oligomers, i.e. consisting of more than one polypeptide molecule. Polypeptide molecules forming such dimers, trimers etc. may be identical or non-identical. The corresponding higher order structures of such multimers are, consequently, termed homo- or heterodimers, homo- or heterotrimers etc. An example for a hereteromultimer is an antibody molecule, which, in its naturally occurring form, consists of two identical light polypeptide chains and two identical heavy polypeptide chains. The terms “polypeptide” and “protein” also refer to naturally modified polypeptides/proteins wherein the modification is effected e.g. by post-translational modifications like glycosylation, acetylation, phosphorylation and the like. Such modifications are well known in the art.

[0041] The term “binding domain” characterizes in connection with the present invention a domain of a polypeptide which specifically binds to/interacts with a given target structure/antigen/epitope. Thus, the binding domain is an “antigen-interaction-site”. The term “antigen-interaction-site” defines, in accordance with the present invention, a motif of a polypeptide, which is able to specifically interact with a specific antigen or a specific group of antigens, e.g. the identical antigen in different species. Said binding/interaction is also understood to define a “specific recognition”. The term “specifically recognizing” means in accordance with this invention that the antibody molecule is capable of specifically interacting with and/or binding to at least two, preferably at least three, more preferably at least four amino acids of an antigen, e.g. the human CD3 antigen as defined herein. Such binding may be exemplified by the specificity of a “lock-and-key-principle”. Thus, specific motifs in the amino acid sequence of the binding domain and the antigen bind to each other as a result of their primary, secondary or tertiary structure as well as the result of secondary modifications of said structure. The specific interaction of the antigen-interaction-site with its specific antigen may result as well in a simple binding of said site to the antigen. Moreover, the specific interaction of the binding domain/antigen-interaction-site with its specific antigen may alternatively result in the initiation of a signal, e.g. due to the induction of a change of the conformation of the antigen, an oligomerization of the antigen, etc. A preferred example of a binding domain in line with the present invention is an antibody. The binding domain may be a monoclonal or polyclonal antibody or derived from a monoclonal or polyclonal antibody.

[0042] The term “antibody” comprises derivatives or functional fragments thereof which still retain the binding specificity. Techniques for the production of antibodies are well known in the art and described, e.g. in Harlow and Lane “Antibodies, A Laboratory Manual”, Cold Spring Harbor Laboratory Press, 1988, Harlow and Lane “Using Antibodies: A Laboratory Manual” Cold Spring Harbor Laboratory Press, 1999 and Little “Recombinant Antibodies for Immunotherapy” Cambridge University Press 2009. The term “antibody” also comprises immunoglobulins (Ig's) of different classes (i.e. IgA, IgG, IgM, IgD and IgE) and subclasses (such as IgG1, IgG2 etc.). The definition of the term “antibody” also includes embodiments such as chimeric, single chain and humanized antibodies, as well as antibody fragments, like, inter alia, Fab fragments. Antibody fragments or derivatives further comprise F(ab′)₂, Fv, scFv fragments or single domain antibodies, single variable domain antibodies or immunoglobulin single variable domain comprising merely one variable domain, which might be VH or VL, that specifically bind to an antigen or epitope independently of other V regions or domains; see, for example, Harlow and Lane (1988) and (1999) and Little (2009), loc. cit. Such immunoglobulin single variable domain encompasses not only an isolated antibody single variable domain polypeptide, but also larger polypeptides that comprise one or more monomers of an antibody single variable domain polypeptide sequence.

[0043] Various procedures are known in the art and may be used for the production of such antibodies and/or fragments. Thus, the (antibody) derivatives can also be produced by peptidomimetics. Further, techniques described for the production of single chain antibodies (see, inter alia, U.S. Pat. No. 4,946,778) can be adapted to produce single chain antibodies specific for elected polypeptide(s). Also, transgenic animals may be used to express humanized or human antibodies specific for polypeptides and fusion proteins of this invention. For the preparation of monoclonal antibodies, any technique, providing antibodies produced by continuous cell line cultures can be used. Examples for such techniques include the hybridoma technique (Köhler and Milstein Nature 256 (1975), 495-497), the trioma technique, the human B-cell hybridoma technique (Kozbor, Immunology Today 4 (1983), 72) and the EBV-hybridoma technique to produce human monoclonal antibodies (Cole et al., Monoclonal Antibodies and Cancer Therapy, Alan R. Liss, Inc. (1985), 77-96). Surface plasmon resonance as employed in the BIAcore system can be used to increase the efficiency of phage antibodies which bind to an epitope of a target polypeptide, such as CD3 epsilon or PSMA (Schier, Human Antibodies Hybridomas 7 (1996), 97-105; Malmborg, J. Immunol. Methods 183 (1995), 7-13). It is also envisaged in the context of this invention that the term “antibody” comprises antibody constructs, which may be expressed in a host as described herein below, e.g. antibody constructs which may be transfected and/or transduced via, inter alia, viruses or plasmid vectors.

[0044] The term “specific interaction” as used in accordance with the present invention means that the binding domain does not or does not significantly cross-react with polypeptides which have similar structure as those bound by the binding domain, and which might be expressed by the same cells as the polypeptide of interest. Cross-reactivity of a panel of binding domains under investigation may be tested, for example, by assessing binding of said panel of binding domains under conventional conditions (see, e.g., Harlow and Lane (1988) and (1999) and Little (2009), loc. cit. Examples for the specific interaction of a binding domain with a specific antigen comprise the specificity of a ligand for its receptor. Said definition particularly comprises the interaction of ligands, which induce a signal upon binding to its specific receptor. Examples for said interaction, which is also particularly comprised by said definition, is the interaction of an antigenic determinant (epitope) with the binding domain (antigenic binding site) of an antibody.

[0045] The term “cross-species specificity” or “interspecies specificity” as used herein means binding of a binding domain described herein to the same target molecule in humans and non-chimpanzee primates. Thus, “cross-species specificity” or “interspecies specificity” is to be understood as an interspecies reactivity to the same molecule “X” expressed in different species, but not to a molecule other than “X”. Cross-species specificity of a monoclonal antibody recognizing e.g. human CD3 epsilon, to a non-chimpanzee primate CD3 epsilon, e.g. macaque CD3 epsilon, can be determined, for instance, by FACS analysis. The FACS analysis is carried out in a way that the respective monoclonal antibody is tested for binding to human and non-chimpanzee primate cells, e.g. macaque cells, expressing said human and non-chimpanzee primate CD3 epsilon antigens, respectively. An appropriate assay is shown in the following examples. The above-mentioned subject matter applies mutatis mutandis for the PSMA antigen: Cross-species specificity of a monoclonal antibody recognizing e.g. human PSMA, to a non-chimpanzee primate PSMA, e.g. macaque PSMA, can be determined, for instance, by FACS analysis. The FACS analysis is carried out in a way that the respective monoclonal antibody is tested for binding to human and non-chimpanzee primate cells, e.g. macaque cells, expressing said human and non-chimpanzee primate PSMA antigens, respectively.

[0046] As used herein, CD3 epsilon denotes a molecule expressed as part of the T cell receptor and has the meaning as typically ascribed to it in the prior art. In human, it encompasses in individual or independently combined form all known CD3 subunits, for example CD3 epsilon, CD3 delta, CD3 gamma, CD3 zeta, CD3 alpha and CD3 beta. The non-chimpanzee primate, non-human CD3 antigens as referred to herein are, for example, Macaca fascicularis CD3 and Macaca mulatta CD3. In Macaca fascicularis, it encompasses CD3 epsilon FN-18 negative and CD3 epsilon FN-18 positive, CD3 gamma and CD3 delta. In Macaca mulatta, it encompasses CD3 epsilon, CD3 gamma and CD3 delta. Preferably, said CD3 as used herein is CD3 epsilon.

[0047] The human CD3 epsilon is indicated in GenBank Accession No. NM_{—}000733 and comprises SEQ ID NO. 1. The human CD3 gamma is indicated in GenBank Accession NO. NM_{—}000073. The human CD3 delta is indicated in GenBank Accession No. NM_{—}000732.

[0048] The CD3 epsilon “FN-18 negative” of Macaca fascicularis (i.e. CD3 epsilon not recognized by monoclonal antibody FN-18 due to a polymorphism as set forth above) is indicated in GenBank Accession No. AB073994.

[0049] The CD3 epsilon “FN-18 positive” of Macaca fascicularis (i.e. CD3 epsilon recognized by monoclonal antibody FN-18) is indicated in GenBank Accession No. AB073993. The CD3 gamma of Macaca fascicularis is indicated in GenBank Accession No. AB073992. The CD3 delta of Macaca fascicularis is indicated in GenBank Accession No. AB073991.

[0050] The nucleic acid sequences and amino acid sequences of the respective CD3 epsilon, gamma and delta homologs of Macaca mulatta can be identified and isolated by recombinant techniques described in the art (Sambrook et al. Molecular Cloning: A Laboratory Manual; Cold Spring Harbor Laboratory Press, 3^{rd} edition 2001). This applies mutatis mutandis to the CD3 epsilon, gamma and delta homologs of other non-chimpanzee primates as defined herein. The identification of the amino acid sequence of Callithrix jacchus, Saimiri sciureus and Saguinus oedipus is described in the appended examples. The amino acid sequence of the extracellular domain of the CD3 epsilon of Callithrix jacchus is depicted in SEQ ID NO: 3, the one of Saguinus oedipus is depicted in SEQ ID NO: 5 and the one of Saimiri sciureus is depicted in SEQ ID NO: 7.

[0051] The human PSMA is indicated in GenBank Accession No. ‘AY101595’. The cloning of the PSMA homolog of macaque is demonstrated in the following examples, the corresponding cDNA and amino acid sequences are shown in SEQ ID NOs. 223 and 224, respectively.

[0052] In line with the above, the term “epitope” defines an antigenic determinant, which is specifically bound/identified by a binding domain as defined herein. The binding domain may specifically bind to/interact with conformational or continuous epitopes, which are unique for the target structure, e.g. the human and non-chimpanzee primate CD3 epsilon chain or the human and non-chimpanzee primate PSMA. A conformational or discontinuous epitope is characterized for polypeptide antigens by the presence of two or more discrete amino acid residues which are separated in the primary sequence, but come together on the surface of the molecule when the polypeptide folds into the native protein/antigen (Sela, (1969) Science 166, 1365 and Layer, (1990) Cell 61, 553-6). The two or more discrete amino acid residues contributing to the epitope are present on separate sections of one or more polypeptide chain(s). These residues come together on the surface of the molecule when the polypeptide chain(s) fold(s) into a three-dimensional structure to constitute the epitope. In contrast, a continuous or linear epitope consists of two or more discrete amino acid residues, which are present in a single linear segment of a polypeptide chain. Within the present invention, a “context-dependent” CD3 epitope refers to the conformation of said epitope. Such a context-dependent epitope, localized on the epsilon chain of CD3, can only develop its correct conformation if it is embedded within the rest of the epsilon chain and held in the right position by heterodimerization of the epsilon chain with either CD3 gamma or delta chain. In contrast, a context-independent CD3 epitope as provided herein refers to an N-terminal 1-27 amino acid residue polypeptide or a functional fragment thereof of CD3 epsilon. This N-terminal 1-27 amino acid residue polypeptide or a functional fragment thereof maintains its three-dimensional structural integrity and correct conformation when taken out of its native environment in the CD3 complex. The context-independency of the N-terminal 1-27 amino acid residue polypeptide or a functional fragment thereof, which is part of the extracellular domain of CD3 epsilon, represents, thus, an epitope which is completely different to the epitopes of CD3 epsilon described in connection with a method for the preparation of human binding molecules in WO 2004/106380. Said method used solely expressed recombinant CD3 epsilon. The conformation of this solely expressed recombinant CD3 epsilon differed from that adopted in its natural form, that is, the form in which the CD3 epsilon subunit of the TCR/CD3 complex exists as part of a noncovalent complex with either the CD3 delta or the CD3-gamma subunit of the TCR/CD3 complex. When such solely expressed recombinant CD3 epsilon protein is used as an antigen for selection of antibodies from an antibody library, antibodies specific for this antigen are identified from the library although such a library does not contain antibodies with specificity for self-antigens/autoantigens. This is due to the fact that solely expressed recombinant CD3 epsilon protein does not exist in vivo; it is not an autoantigen. Consequently, subpopulations of B cells expressing antibodies specific for this protein have not been depleted in vivo; an antibody library constructed from such B cells would contain genetic material for antibodies specific for solely expressed recombinant CD3 epsilon protein.

[0053] However, since the context-independent N-terminal 1-27 amino acid residue polypeptide or a functional fragment thereof is an epitope, which folds in its native form, binding domains in line with the present invention cannot be identified by methods based on the approach described in WO 2004/106380. Therefore, it could be verified in tests that binding molecules as disclosed in WO 2004/106380 are not capable of binding to the N-terminal 1-27 amino acid residues of the CD3 epsilon chain. Hence, conventional anti-CD3 binding molecules or anti-CD3 antibody molecules (e.g. as disclosed in WO 99/54440) bind CD3 epsilon chain at a position which is more C-terminally located than the context-independent N-terminal 1-27 amino acid residue polypeptide or a functional fragment provided herein. Prior art antibody molecules OKT3 and UCHT-1 have also a specificity for the epsilon-subunit of the TCR/CD3 complex between amino acid residues 35 to 85 and, accordingly, the epitope of these antibodies is also more C-terminally located. In addition, UCHT-1 binds to the CD3 epsilon chain in a region between amino acid residues 43 to 77 (Tunnacliffe, Int. Immunol. 1 (1989), 546-50; Kjer-Nielsen, PNAS 101, (2004), 7675-7680; Salmeron, J. Immunol. 147 (1991), 3047-52). Therefore, prior art anti-CD3 molecules do not bind to and are not directed against the herein defined context-independent N-terminal 1-27 amino acid residue epitope (or a functional fragment thereof). In particular, the state of the art fails to provide anti-CD3 molecules which specifically binds to the context-independent N-terminal 1-27 amino acid residue epitope and which are cross-species specific, i.e. bind to human and non-chimpanzee primate CD3 epsilon.

[0054] For the generation of a, preferably human, binding domain comprised in a bispecific single chain antibody molecule of the invention, e.g. monoclonal antibodies binding to both the human and non-chimpanzee primate CD3 epsilon (e.g. macaque CD3 epsilon) or monoclonal antibodies binding to both the human and non-chimpanzee primate PSMA can be used.

[0055] As used herein, “human” and “man” refers to the species Homo sapiens. As far as the medical uses of the constructs described herein are concerned, human patients are to be treated with the same molecule.

[0056] It is preferred that at least one of said first or second binding domains of the bispecific single chain antibody of the invention is CDR-grafted, humanized or human. Preferably, both the first and second binding domains of the bispecific single chain antibody of the invention are CDR-grafted, humanized or human.

[0057] The term “human” antibody as used herein is to be understood as meaning that the bispecific single chain antibody as defined herein, comprises (an) amino acid sequence(s) contained in the human germline antibody repertoire. For the purposes of definition herein, said bispecific single chain antibody may therefore be considered human if it consists of such (a) human germline amino acid sequence(s), i.e. if the amino acid sequence(s) of the bispecific single chain antibody in question is (are) identical to (an) expressed human germline amino acid sequence(s). A bispecific single chain antibody as defined herein may also be regarded as human if it consists of (a) sequence(s) that deviate(s) from its (their) closest human germline sequence(s) by no more than would be expected due to the imprint of somatic hypermutation. Additionally, the antibodies of many non-human mammals, for example rodents such as mice and rats, comprise VH CDR3 amino acid sequences which one may expect to exist in the expressed human antibody repertoire as well. Any such sequence(s) of human or non-human origin which may be expected to exist in the expressed human repertoire would also be considered “human” for the purposes of the present invention.

[0058] As used herein, the term “humanized”, “humanization”, “human-like” or grammatically related variants thereof are used interchangeably to refer to a bispecific single chain antibody comprising in at least one of its binding domains at least one complementarity determining region (“CDR”) from a non-human antibody or fragment thereof. Humanization approaches are described for example in WO 91/09968 and U.S. Pat. No. 6,407,213. As non-limiting examples, the term encompasses the case in which a variable region of at least one binding domain comprises a single CDR region, for example the third CDR region of the VH (CDRH3), from another non-human animal, for example a rodent, as well as the case in which a or both variable region/s comprise at each of their respective first, second and third CDRs the CDRs from said non-human animal. In the event that all CDRs of a binding domain of the bispecific single chain antibody have been replaced by their corresponding equivalents from, for example, a rodent, one typically speaks of “CDR-grafting”, and this term is to be understood as being encompassed by the term “humanized” or grammatically related variants thereof as used herein. The term “humanized” or grammatically related variants thereof also encompasses cases in which, in addition to replacement of one or more CDR regions within a VH and/or VL of the first and/or second binding domain further mutation/s (e.g. substitutions) of at least one single amino acid residue/s within the framework (“FR”) regions between the CDRs has/have been effected such that the amino acids at that/those positions correspond/s to the amino acid/s at that/those position/s in the animal from which the CDR regions used for replacement is/are derived. As is known in the art, such individual mutations are often made in the framework regions following CDR-grafting in order to restore the original binding affinity of the non-human antibody used as a CDR-donor for its target molecule. The term “humanized” may further encompass (an) amino acid substitution(s) in the CDR regions from a non-human animal to the amino acid(s) of a corresponding CDR region from a human antibody, in addition to the amino acid substitutions in the framework regions as described above.

[0059] As used herein, the term “homolog” or “homology” is to be understood as follows: Homology among proteins and DNA is often concluded on the basis of sequence similarity, especially in bioinformatics. For example, in general, if two or more genes have highly similar DNA sequences, it is likely that they are homologous. But sequence similarity may arise from different ancestors: short sequences may be similar by chance, and sequences may be similar because both were selected to bind to a particular protein, such as a transcription factor. Such sequences are similar but not homologous. Sequence regions that are homologous are also called conserved. This is not to be confused with conservation in amino acid sequences in which the amino acid at a specific position has changed but the physio-chemical properties of the amino acid remain unchanged. Homologous sequences are of two types: orthologous and paralogous. Homologous sequences are orthologous if they were separated by a speciation event: when a species diverges into two separate species, the divergent copies of a single gene in the resulting species are said to be orthologous. Orthologs, or orthologous genes, are genes in different species that are similar to each other because they originated from a common ancestor. The strongest evidence that two similar genes are orthologous is the result of a phylogenetic analysis of the gene lineage. Genes that are found within one clade are orthologs, descended from a common ancestor. Orthologs often, but not always, have the same function. Orthologous sequences provide useful information in taxonomic classification studies of organisms. The pattern of genetic divergence can be used to trace the relatedness of organisms. Two organisms that are very closely related are likely to display very similar DNA sequences between two orthologs. Conversely, an organism that is further removed evolutionarily from another organism is likely to display a greater divergence in the sequence of the orthologs being studied. Homologous sequences are paralogous if they were separated by a gene duplication event: if a gene in an organism is duplicated to occupy two different positions in the same genome, then the two copies are paralogous. A set of sequences that are paralogous are called paralogs of each other. Paralogs typically have the same or similar function, but sometimes do not: due to lack of the original selective pressure upon one copy of the duplicated gene, this copy is free to mutate and acquire new functions. An example can be found in rodents such as rats and mice. Rodents have a pair of paralogous insulin genes, although it is unclear if any divergence in function has occurred. Paralogous genes often belong to the same species, but this is not necessary: for example, the hemoglobin gene of humans and the myoglobin gene of chimpanzees are paralogs. This is a common problem in bioinformatics: when genomes of different species have been sequenced and homologous genes have been found, one can not immediately conclude that these genes have the same or similar function, as they could be paralogs whose function has diverged.

[0060] As used herein, a “non-chimpanzee primate” or “non-chimp primate” or grammatical variants thereof refers to any primate animal (i.e. not human) other than chimpanzee, i.e. other than an animal of belonging to the genus Pan, and including the species Pan paniscus and Pan troglodytes, also known as Anthropopithecus troglodytes or Simia satyrus. It will be understood, however, that it is possible that the antibodies of the invention can also bind with their first and/or second binding domain to the respective epitopes/fragments etc. of said chimpanzees. The intention is merely to avoid animal tests which are carried out with chimpanzees, if desired. It is thus also envisaged that in another embodiment the antibodies of the present invention also bind with their first and/or second binding domain to the respective epitopes of chimpanzees. A “primate”, “primate species”, “primates” or grammatical variants thereof denote/s an order of eutherian mammals divided into the two suborders of prosimians and anthropoids and comprising apes, monkeys and lemurs. Specifically, “primates” as used herein comprises the suborder Strepsirrhini (non-tarsier prosimians), including the infraorder Lemuriformes (itself including the superfamilies Chemogaleoidea and Lemuroidea), the infraorder Chiromyiformes (itself including the family Daubentoniidae) and the infraorder Lorisiformes (itself including the families Lorisidae and Galagidae). “Primates” as used herein also comprises the suborder Haplorrhini, including the infraorder Tarsiiformes (itself including the family Tarsiidae), the infraorder Simiiformes (itself including the Platyrrhini, or New-World monkeys, and the Catarrhini, including the Cercopithecidea, or Old-World Monkeys).

[0061] The non-chimpanzee primate species may be understood within the meaning of the invention to be a lemur, a tarsier, a gibbon, a marmoset (belonging to New-World Monkeys of the family Cebidae) or an Old-World Monkey (belonging to the superfamily Cercopithecoidea).

[0062] As used herein, an “Old-World Monkey” comprises any monkey falling in the superfamily Cercopithecoidea, itself subdivided into the families: the Cercopithecinae, which are mainly African but include the diverse genus of macaques which are Asian and North African; and the Colobinae, which include most of the Asian genera but also the African colobus monkeys.

[0063] Specifically, within the subfamily Cercopithecinae, an advantageous non-chimpanzee primate may be from the Tribe Cercopithecini, within the genus Allenopithecus (Allen's Swamp Monkey, Allenopithecus nigroviridis); within the genus Miopithecus (Angolan Talapoin, Miopithecus talapoin; Gabon Talapoin, Miopithecus ogouensis); within the genus Erythrocebus (Patas Monkey, Erythrocebus patas); within the genus Chlorocebus (Green Monkey, Chlorocebus sabaceus; Grivet, Chlorocebus aethiops; Bale Mountains Vervet, Chlorocebus djamdjamensis; Tantalus Monkey, Chlorocebus tantalus; Vervet Monkey, Chlorocebus pygerythrus; Malbrouck, Chlorocebus cynosuros); or within the genus Cercopithecus (Dryas Monkey or Salongo Monkey, Cercopithecus dryas; Diana Monkey, Cercopithecus diana; Roloway Monkey, Cercopithecus roloway; Greater Spot-nosed Monkey, Cercopithecus nictitans; Blue Monkey, Cercopithecus mitis; Silver Monkey, Cercopithecus doggetti; Golden Monkey, Cercopithecus kandti; Sykes's Monkey, Cercopithecus albogularis; Mona Monkey, Cercopithecus mona; Campbell's Mona Monkey, Cercopithecus campbelli; Lowe's Mona Monkey, Cercopithecus lowei; Crested Mona Monkey, Cercopithecus pogonias; Wolf's Mona Monkey, Cercopithecus wolfi; Dent's Mona Monkey, Cercopithecus denti; Lesser Spot-nosed Monkey, Cercopithecus petaurista; White-throated Guenon, Cercopithecus erythrogaster; Sclater's Guenon, Cercopithecus sclateri; Red-eared Guenon, Cercopithecus erythrotis; Moustached Guenon, Cercopithecus cephus; Red-tailed Monkey, Cercopithecus ascanius; L'Hoest's Monkey, Cercopithecus lhoesti; Preuss's Monkey, Cercopithecus preussi; Sun-tailed Monkey, Cercopithecus solatus; Hamlyn's Monkey or Owl-faced Monkey, Cercopithecus hamlyni; De Brazza's Monkey, Cercopithecus neglectus). Alternatively, an advantageous non-chimpanzee primate, also within the subfamily Cercopithecinae but within the Tribe Papionini, may be from within the genus Macaca (Barbary Macaque, Macaca sylvanus; Lion-tailed Macaque, Macaca silenus; Southern Pig-tailed Macaque or Beruk, Macaca nemestrina; Northern Pig-tailed Macaque, Macaca leonina; Pagai Island Macaque or Bokkoi, Macaca pagensis; Siberut Macaque, Macaca siberu; Moor Macaque, Macaca maura; Booted Macaque, Macaca ochreata; Tonkean Macaque, Macaca tonkeana; Heck's Macaque, Macaca hecki; Gorontalo Macaque, Macaca nigriscens; Celebes Crested Macaque or Black “Ape”, Macaca nigra; Cynomolgus monkey or Crab-eating Macaque or Long-tailed Macaque or Kera, Macaca fascicularis; Stump-tailed Macaque or Bear Macaque, Macaca arctoides; Rhesus Macaque, Macaca mulatta; Formosan Rock Macaque, Macaca cyclopis; Japanese Macaque, Macaca fuscata; Toque Macaque, Macaca sinica; Bonnet Macaque, Macaca radiata; Barbary Macaque, Macaca sylvanmus; Assam Macaque, Macaca assamensis; Tibetan Macaque or Milne-Edwards' Macaque, Macaca thibetana; Arunachal Macaque or Munzala, Macaca munzala); within the genus Lophocebus (Gray-cheeked Mangabey, Lophocebus albigena; Lophocebus albigena albigena; Lophocebus albigena osmani; Lophocebus albigena johnstoni; Black Crested Mangabey, Lophocebus aterrimus; Opdenbosch's Mangabey, Lophocebus opdenboschi; Highland Mangabey, Lophocebus kipunji); within the genus Papio (Hamadryas Baboon, Papio hamadryas; Guinea Baboon, Papio papio; Olive Baboon, Papio anubis; Yellow Baboon, Papio cynocephalus; Chacma Baboon, Papio ursinus); within the genus Theropithecus (Gelada, Theropithecus gelada); within the genus Cercocebus (Sooty Mangabey, Cercocebus atys; Cercocebus atys atys; Cercocebus atys lunulatus; Collared Mangabey, Cercocebus torquatus; Agile Mangabey, Cercocebus agilis; Golden-bellied Mangabey, Cercocebus chrysogaster; Tana River Mangabey, Cercocebus galeritus; Sanje Mangabey, Cercocebus sanjei); or within the genus Mandrillus (Mandrill, Mandrillus sphinx; Drill, Mandrillus leucophaeus). Most preferred is Macaca fascicularis (also known as Cynomolgus monkey and, therefore, in the Examples named “Cynomolgus”) and Macaca mulatta (rhesus monkey, named “rhesus”).

[0064] Within the subfamily Colobinae, an advantageous non-chimpanzee primate may be from the African group, within the genus Colobus (Black Colobus, Colobus satanas; Angola Colobus, Colobus angolensis; King Colobus, Colobus polykomos; Ursine Colobus, Colobus vellerosus; Mantled Guereza, Colobus guereza); within the genus Piliocolobus (Western Red Colobus, Piliocolobus badius; Piliocolobus badius badius; Piliocolobus badius temminckii; Piliocolobus badius waldronae; Pennant's Colobus, Piliocolobus pennantii; Piliocolobus pennantii pennantii; Piliocolobus pennantii epieni; Piliocolobus pennantii bouvieri; Preuss's Red Colobus, Piliocolobus preussi; Thollon's Red Colobus, Piliocolobus tholloni; Central African Red Colobus, Piliocolobus foai; Piliocolobus foai foai; Piliocolobus foai ellioti; Piliocolobus foai oustaleti; Piliocolobus foai semlikiensis; Piliocolobus foai parmentierorum; Ugandan Red Colobus, Piliocolobus tephrosceles; Uzyngwa Red Colobus, Piliocolobus gordonorum; Zanzibar Red Colobus, Piliocolobus kirkii; Tana River Red Colobus, Piliocolobus rufomitratus); or within the genus Procolobus (Olive Colobus, Procolobus verus). Within the subfamily Colobinae, an advantageous non-chimpanzee primate may alternatively be from the Langur (leaf monkey) group, within the genus Semnopithecus (Nepal Gray Langur, Semnopithecus schistaceus; Kashmir Gray Langur, Semnopithecus ajax; Tarai Gray Langur, Semnopithecus hector; Northern Plains Gray Langur, Semnopithecus entellus; Black-footed Gray Langur, Semnopithecus hypoleucos; Southern Plains Gray Langur, Semnopithecus dussumieri; Tufted Gray Langur, Semnopithecus priam); within the T. vetulus group or the genus Trachypithecus (Purple-faced Langur, Trachypithecus vetulus; Nilgiri Langur, Trachypithecus johnii); within the T. cristatus group of the genus Trachypithecus (Javan Lutung, Trachypithecus auratus; Silvery Leaf Monkey or Silvery Lutung, Trachypithecus cristatus; Indochinese Lutung, Trachypithecus germaini; Tenasserim Lutung, Trachypithecus barbel); within the T. obscurus group of the genus Trachypithecus (Dusky Leaf Monkey or Spectacled Leaf Monkey, Trachypithecus obscurus; Phayre's Leaf Monkey, Trachypithecus phayrei); within the T. pileatus group of the genus Trachypithecus (Capped Langur, Trachypithecus pileatus; Shortridge's Langur, Trachypithecus shortridgei; Gee's Golden Langur, Trachypithecus geei); within the T. francoisi group of the genus Trachypithecus (Francois' Langur, Trachypithecus francoisi; Hatinh Langur, Trachypithecus hatinhensis; White-headed Langur, Trachypithecus poliocephalus; Laotian Langur, Trachypithecus laotum; Delacour's Langur, Trachypithecus delacouri; Indochinese Black Langur, Trachypithecus ebenus); or within the genus Presbytis (Sumatran Surili, Presbytis melalophos; Banded Surili, Presbytis femoralis; Sarawak Surili, Presbytis chrysomelas; White-thighed Surili, Presbytis siamensis; White-fronted Surili, Presbytis frontata; Javan Surili, Presbytis comata; Thomas's Langur, Presbytis thomasi; Hose's Langur, Presbytis hosei; Maroon Leaf Monkey, Presbytis rubicunda; Mentawai Langur or Joja, Presbytis potenziani; Natuna Island Surili, Presbytis natunae).

[0065] Within the subfamily Colobinae, an advantageous non-chimpanzee primate may alternatively be from the Odd-Nosed group, within the genus Pygathrix (Red-shanked Douc, Pygathrix nemaeus; Black-shanked Douc, Pygathrix nigripes; Gray-shanked Douc, Pygathrix cinerea); within the genus Rhinopithecus (Golden Snub-nosed Monkey, Rhinopithecus roxellana; Black Snub-nosed Monkey, Rhinopithecus bieti; Gray Snub-nosed Monkey, Rhinopithecus brelichi; Tonkin Snub-nosed Langur, Rhinopithecus avunculus); within the genus Nasalis (Proboscis Monkey, Nasalis larvatus); or within the genus Simias (Pig-tailed Langur, Simias concolor).

[0066] As used herein, the term “marmoset” denotes any New-World Monkeys of the genus Callithrix, for example belonging to the Atlantic marmosets of subgenus Callithrix (sic!) (Common Marmoset, Callithrix (Callithrix) jacchus; Black-tufted Marmoset, Callithrix (Callithrix) penicillata; Wied's Marmoset, Callithrix (Callithrix) kuhffi; White-headed Marmoset, Callithrix (Callithrix) geoffroyi; Buffy-headed Marmoset, Callithrix (Callithrix) flaviceps; Buffy-tufted Marmoset, Callithrix (Callithrix) aurita); belonging to the Amazonian marmosets of subgenus Mico (Rio Acari Marmoset, Callithrix (Mico) acariensis; Manicore Marmoset, Callithrix (Mico) manicorensis; Silvery Marmoset, Callithrix (Mico) argentata; White Marmoset, Callithrix (Mico) leucippe; Emilia's Marmoset, Callithrix (Mico) emffiae; Black-headed Marmoset, Callithrix (Mico) nigriceps; Marca's Marmoset, Callithrix (Mico)marcai; Black-tailed Marmoset, Callithrix (Mico) melanura; Santarem Marmoset, Callithrix (Mico) humeralifera; Maués Marmoset, Callithrix (Mico) mauesi; Gold-and-white Marmoset, Callithrix (Mico) chrysoleuca; Hershkovitz's Marmoset, Callithrix (Mico) intermedia; Satéré Marmoset, Callithrix (Mico) saterei); Roosmalens' Dwarf Marmoset belonging to the subgenus Callibella (Callithrix (Callibella) humilis); or the Pygmy Marmoset belonging to the subgenus Cebuella (Callithrix (Cebuella) pygmaea).

[0067] Other genera of the New-World Monkeys comprise tamarins of the genus Saguinus (comprising the S. oedipus-group, the S. midas group, the S. nigricollis group, the S. mystax group, the S. bicolor group and the S. inustus group) and squirrel monkeys of the genus Samiri (e.g. Saimiri sciureus, Saimiri oerstedii, Saimiri ustus, Saimiri boliviensis, Saimiri vanzolini)

[0068] In a preferred embodiment of the bispecific single chain antibody molecule of the invention, the non-chimpanzee primate is an old world monkey. In a more preferred embodiment of the polypeptide, the old world monkey is a monkey of the Papio genus Macaque genus. Most preferably, the monkey of the Macaque genus is Assamese macaque (Macaca assamensis), Barbary macaque (Macaca sylvanus), Bonnet macaque (Macaca radiata), Booted or Sulawesi-Booted macaque (Macaca ochreata), Sulawesi-crested macaque (Macaca nigra), Formosan rock macaque (Macaca cyclopsis), Japanese snow macaque or Japanese macaque (Macaca fuscata), Cynomologus monkey or crab-eating macaque or long-tailed macaque or Java macaque (Macaca fascicularis), Lion-tailed macaque (Macaca silenus), Pigtailed macaque (Macaca nemestrina), Rhesus macaque (Macaca mulatta), Tibetan macaque (Macaca thibetana), Tonkean macaque (Macaca tonkeana), Toque macaque (Macaca sinica), Stump-tailed macaque or Red-faced macaque or Bear monkey (Macaca arctoides), or Moor macaque (Macaca maurus). Most preferably, the monkey of the Papio genus is Hamadryas Baboon, Papio hamadryas; Guinea Baboon, Papio papio; Olive Baboon, Papio anubis; Yellow Baboon, Papio cynocephalus; Chacma Baboon, Papio ursinus.

[0069] In an alternatively preferred embodiment of the bispecific single chain antibody molecule of the invention, the non-chimpanzee primate is a new world monkey. In a more preferred embodiment of the polypeptide, the new world monkey is a monkey of the Callithrix genus (marmoset), the Saguinus genus or the Samiri genus. Most preferably, the monkey of the Callithrix genus is Callithrix jacchus, the monkey of the Saguinus genus is Saguinus oedipus and the monkey of the Samiri genus is Saimiri sciureus.

[0070] The term “cell surface antigen” as used herein denotes a molecule, which is displayed on the surface of a cell. In most cases, this molecule will be located in or on the plasma membrane of the cell such that at least part of this molecule remains accessible from outside the cell in tertiary form. A non-limiting example of a cell surface molecule, which is located in the plasma membrane is a transmembrane protein comprising, in its tertiary conformation, regions of hydrophilicity and hydrophobicity. Here, at least one hydrophobic region allows the cell surface molecule to be embedded, or inserted in the hydrophobic plasma membrane of the cell while the hydrophilic regions extend on either side of the plasma membrane into the cytoplasm and extracellular space, respectively. Non-limiting examples of cell surface molecules which are located on the plasma membrane are proteins which have been modified at a cysteine residue to bear a palmitoyl group, proteins modified at a C-terminal cysteine residue to bear a farnesyl group or proteins which have been modified at the C-terminus to bear a glycosyl phosphatidyl inositol (“GPI”) anchor. These groups allow covalent attachment of proteins to the outer surface of the plasma membrane, where they remain accessible for recognition by extracellular molecules such as antibodies. Examples of cell surface antigens are CD3 epsilon and PSMA. As described herein above, PSMA is a cell surface antigen which is a target for therapy of cancer, including, but not limited to solid tumors, preferably carcinomas and prostate cancer.

[0071] In light of this, PSMA can also be characterized as a tumor antigen. The term “tumor antigen” as used herein may be understood as those antigens that are presented on tumor cells. These antigens can be presented on the cell surface with an extracellular part, which is often combined with a transmembrane and cytoplasmic part of the molecule. These antigens can sometimes be presented only by tumor cells and never by the normal ones. Tumor antigens can be exclusively expressed on tumor cells or might represent a tumor specific mutation compared to normal cells. In this case, they are called tumor-specific antigens. More common are antigens that are presented by tumor cells and normal cells, and they are called tumor-associated antigens. These tumor-associated antigens can be overexpressed compared to normal cells or are accessible for antibody binding in tumor cells due to the less compact structure of the tumor tissue compared to normal tissue. One example for a tumor antigen in line with the present invention is PSMA.

[0072] As described herein above the bispecific single chain antibody molecule of the invention binds with the first binding domain to an epitope of human and non-chimpanzee primate CD3ε (epsilon) chain, wherein the epitope is part of an amino acid sequence comprised in the group consisting of 27 amino acid residues as depicted in SEQ ID NOs. 2, 4, 6, or 8 or a functional fragment thereof.

[0073] In line with the present invention it is preferred for the bispecific single chain antibody molecule of the invention that said epitope is part of an amino acid sequence comprising 26, 25, 24, 23, 22, 21, 20, 19, 18, 17, 16, 15, 14, 13, 12, 11, 10, 9, 8, 7, 6 or 5 amino acids.

[0074] More preferably, wherein said epitope comprises at least the amino acid sequence Gln-Asp-Gly-Asn-Glu (Q-D-G-N-E).

[0075] Within the present invention, a functional fragment of the N-terminal 1-27 amino acid residues means that said functional fragment is still a context-independent epitope maintaining its three-dimensional structural integrity when taken out of its native environment in the CD3 complex (and fused to a heterologous amino acid sequence such as EpCAM or an immunoglobulin Fc part, e.g. as shown in Example 3.1 of WO 2008/119567). The maintenance of the three-dimensional structure within the 27 amino acid N-terminal polypeptide or functional fragment thereof of CD3 epsilon can be used for the generation of binding domains which bind to the N-terminal CD3 epsilon polypeptide fragment in vitro and to the native (CD3 epsilon subunit of the) CD3 complex on T cells in vivo with the same binding affinity. Within the present invention, a functional fragment of the N-terminal 1-27 amino acid residues means that CD3 binding domains provided herein can still bind to such functional fragments in a context-independent manner. The person skilled in the art is aware of methods for epitope mapping to determine which amino acid residues of an epitope are recognized by such anti-CD3 binding domains (e.g. alanine scanning; see examples of WO 2008/119567).

[0076] In one embodiment of the invention, the bispecific single chain antibody molecule of the invention comprises a (first) binding domain capable of binding to an epitope of human and non-chimpanzee primate CD3ε chain and a second binding domain capable of binding to the cell surface antigen PSMA.

[0077] Within the present invention it is further preferred that the second binding domain binds to the human cell surface antigen PSMA and/or a non-chimpanzee primate PSMA. Particularly preferred, the second binding domain binds to the human PSMA and a non-chimpanzee primate PSMA, preferably a macaque PSMA. It is to be understood, that the second binding domain binds to at least one non-chimpanzee primate PSMA, however, it may also bind to two, three or more, non-chimpanzee primate PSMA homologs. For example, the second binding domain may bind to the Cynomolgus monkey PSMA and to the Rhesus monkey PSMA.

[0078] The present invention including all methods, uses, kits etc. described herein, also relates to the seconed binding domains as such (i.e. not in the context of a bispecific single chain antibody). “As such” further includes antibody formats other than the bispecific single chain antibodies as described herein, for example antibody fragments (comprising the second domain), humanized antibodies, fusion proteins comprising the second domain etc. Antibody formats other than the bispecific single chain antibodies of the present invention are also described herein above.

[0079] For the generation of the second binding domain of the bispecific single chain antibody molecule of the invention, e.g. bispecific single chain antibodies as defined herein, monoclonal antibodies binding to both of the respective human and/or non-chimpanzee primate cell surface antigen such as PSMA can be utilized. Appropriate binding domains for the bispecific polypeptide as defined herein e.g. can be derived from cross-species specific monoclonal antibodies by recombinant methods described in the art. A monoclonal antibody binding to a human cell surface antigen and to the homolog of said cell surface antigen in a non-chimpanzee primate can be tested by FACS assays as set forth above. It is evident to those skilled in the art that cross-species specific antibodies can also be generated by hybridoma techniques described in the literature (Milstein and Köhler, Nature 256 (1975), 495-7). For example, mice may be alternately immunized with human and non-chimpanzee primate cell surface antigen, such as PSMA. From these mice, cross-species specific antibody-producing hybridoma cells are isolated via hybridoma technology and analysed by FACS as set forth above. The generation and analysis of bispecific polypeptides such as bispecific single chain antibodies exhibiting cross-species specificity as described herein is shown in the following examples. The advantages of the bispecific single chain antibodies exhibiting cross-species specificity include the points enumerated herein.

[0080] It is particularly preferred for the bispecific single chain antibody molecule of the invention that the first binding domain capable of binding to an epitope of human and non-chimpanzee primate CD3ε chain comprises a VL region comprising CDR-L1, CDR-L2 and CDR-L3 selected from:
[0081] (a) CDR-L1 as depicted in SEQ ID NO. 27, CDR-L2 as depicted in SEQ ID NO. 28 and CDR-L3 as depicted in SEQ ID NO. 29;
[0082] (b) CDR-L1 as depicted in SEQ ID NO. 117, CDR-L2 as depicted in SEQ ID NO. 118 and CDR-L3 as depicted in SEQ ID NO. 119; and
[0083] (c) CDR-L1 as depicted in SEQ ID NO. 153, CDR-L2 as depicted in SEQ ID NO. 154 and CDR-L3 as depicted in SEQ ID NO. 155.

[0084] The variable regions, i.e. the variable light chain (“L” or “VL”) and the variable heavy chain (“H” or “VH”) are understood in the art to provide the binding domain of an antibody. This variable regions harbor the complementary determining regions.

[0085] The term “complementary determining region” (CDR) is well known in the art to dictate the antigen specificity of an antibody. The term “CDR-L” or “L CDR” or “LCDR” refers to CDRs in the VL, whereas the term “CDR-H” or “H CDR” or HCDR” refers to the CDRs in the VH.

[0086] In an alternatively preferred embodiment of the bispecific single chain antibody molecule of the invention the first binding domain capable of binding to an epitope of human and non-chimpanzee primate CD3ε chain comprises a VH region comprising CDR-H1, CDR-H2 and CDR-H3 selected from:
[0087] (a) CDR-H1 as depicted in SEQ ID NO. 12, CDR-H2 as depicted in SEQ ID NO. 13 and CDR-H3 as depicted in SEQ ID NO. 14;
[0088] (b) CDR-H1 as depicted in SEQ ID NO. 30, CDR-H2 as depicted in SEQ ID NO. 31 and CDR-H3 as depicted in SEQ ID NO. 32;
[0089] (c) CDR-H1 as depicted in SEQ ID NO. 48, CDR-H2 as depicted in SEQ ID NO. 49 and CDR-H3 as depicted in SEQ ID NO. 50;
[0090] (d) CDR-H1 as depicted in SEQ ID NO. 66, CDR-H2 as depicted in SEQ ID NO. 67 and CDR-H3 as depicted in SEQ ID NO. 68;
[0091] (e) CDR-H1 as depicted in SEQ ID NO. 84, CDR-H2 as depicted in SEQ ID NO. 85 and CDR-H3 as depicted in SEQ ID NO. 86;
[0092] (f) CDR-H1 as depicted in SEQ ID NO. 102, CDR-H2 as depicted in SEQ ID NO. 103 and CDR-H3 as depicted in SEQ ID NO. 104;
[0093] (g) CDR-H1 as depicted in SEQ ID NO. 120, CDR-H2 as depicted in SEQ ID NO. 121 and CDR-H3 as depicted in SEQ ID NO. 122;
[0094] (h) CDR-H1 as depicted in SEQ ID NO. 138, CDR-H2 as depicted in SEQ ID NO. 139 and CDR-H3 as depicted in SEQ ID NO. 140;
[0095] (i) CDR-H1 as depicted in SEQ ID NO. 156, CDR-H2 as depicted in SEQ ID NO. 157 and CDR-H3 as depicted in SEQ ID NO. 158; and
[0096] (j) CDR-H1 as depicted in SEQ ID NO. 174, CDR-H2 as depicted in SEQ ID NO. 175 and CDR-H3 as depicted in SEQ ID NO. 176.

[0097] It is further preferred that the binding domain capable of binding to an epitope of human and non-chimpanzee primate CD3ε chain comprises a VL region selected from the group consisting of a VL region as depicted in SEQ ID NO. 35, 39, 125, 129, 161 or 165.

[0098] It is alternatively preferred that the first binding domain capable of binding to an epitope of human and non-chimpanzee primate CD3ε chain comprises a VH region selected from the group consisting of a VH region as depicted in SEQ ID NO. 15, 19, 33, 37, 51, 55, 69, 73, 87, 91, 105, 109, 123, 127, 141, 145, 159, 163, 177 or 181.

[0099] More preferably, the bispecific single chain antibody molecule of the invention is characterized by the first binding domain capable of binding to an epitope of human and non-chimpanzee primate CD3ε chain, which comprises a VL region and a VH region selected from the group consisting of:
[0100] (a) a VL region as depicted in SEQ ID NO. 17 or 21 and a VH region as depicted in SEQ ID NO. 15 or 19;
[0101] (b) a VL region as depicted in SEQ ID NO. 35 or 39 and a VH region as depicted in SEQ ID NO. 33 or 37;
[0102] (c) a VL region as depicted in SEQ ID NO. 53 or 57 and a VH region as depicted in SEQ ID NO. 51 or 55;
[0103] (d) a VL region as depicted in SEQ ID NO. 71 or 75 and a VH region as depicted in SEQ ID NO. 69 or 73;
[0104] (e) a VL region as depicted in SEQ ID NO. 89 or 93 and a VH region as depicted in SEQ ID NO. 87 or 91;
[0105] (f) a VL region as depicted in SEQ ID NO. 107 or 111 and a VH region as depicted in SEQ ID NO. 105 or 109;
[0106] (g) a VL region as depicted in SEQ ID NO. 125 or 129 and a VH region as depicted in SEQ ID NO. 123 or 127;
[0107] (h) a VL region as depicted in SEQ ID NO. 143 or 147 and a VH region as depicted in SEQ ID NO. 141 or 145;
[0108] (i) a VL region as depicted in SEQ ID NO. 161 or 165 and a VH region as depicted in SEQ ID NO. 159 or 163; and
[0109] (j) a VL region as depicted in SEQ ID NO. 179 or 183 and a VH region as depicted in SEQ ID NO. 177 or 181.

[0110] According to a preferred embodiment of the bispecific single chain antibody molecule of the invention the pairs of VH-regions and VL-regions in the first binding domain binding to CD3 epsilon are in the format of a single chain antibody (scFv). The VH and VL regions are arranged in the order VH-VL or VL-VH. It is preferred that the VH-region is positioned N-terminally to a linker sequence. The VL-region is positioned C-terminally of the linker sequence. Put in other words, the domain arrangement in the CD3 binding domain of the bispecific single chain antibody molecule of the invention is preferably VH-VL, with said CD3 binding domain located C-terminally to the second (cell surface antigen, such as PSMA) binding domain. Preferably the VH-VL comprises or is SEQ ID NO. 185.

[0111] A preferred embodiment of the above described bispecific single chain antibody molecule of the invention is characterized by the first binding domain capable of binding to an epitope of human and non-chimpanzee primate CD3ε chain comprising an amino acid sequence selected from the group consisting of SEQ ID NOs: 23, 25, 41, 43, 59, 61, 77, 79, 95, 97, 113, 115, 131, 133, 149, 151, 167, 169, 185 or 187.

[0112] The invention further relates to an above described bispecific single chain antibody, wherein the second binding domain binds to the cell surface antigen PSMA. According to a preferred embodiment of the invention an above characterized bispecific single chain antibody molecule comprises a group of the following sequences as CDR H1, CDR H2, CDR H3, CDR L1, CDR L2 and CDR L3 in the second binding domain selected from the group consisting of:
[0113] a) CDR H1-3 of SEQ ID NO: 226-228 and CDR L1-3 of SEQ ID NO: 231-233;
[0114] b) CDR H1-3 of SEQ ID NO: 240-242 and CDR L1-3 of SEQ ID NO: 245-247;
[0115] c) CDR H1-3 of SEQ ID NO: 254-256 and CDR L1-3 of SEQ ID NO: 259-261;
[0116] d) CDR H1-3 of SEQ ID NO: 268-270 and CDR L1-3 of SEQ ID NO: 273-275;
[0117] e) CDR H1-3 of SEQ ID NO: 618-620 and CDR L1-3 of SEQ ID NO: 623-625;
[0118] f) CDR H1-3 of SEQ ID NO: 282-284 and CDR L1-3 of SEQ ID NO: 287-289;
[0119] g) CDR H1-3 of SEQ ID NO: 296-298 and CDR L1-3 of SEQ ID NO: 301-303;
[0120] h) CDR H1-3 of SEQ ID NO: 310-312 and CDR L1-3 of SEQ ID NO: 315-317;
[0121] i) CDR H1-3 of SEQ ID NO: 324-326 and CDR L1-3 of SEQ ID NO: 329-331;
[0122] j) CDR H1-3 of SEQ ID NO: 338-340 and CDR L1-3 of SEQ ID NO: 343-345;
[0123] k) CDR H1-3 of SEQ ID NO: 352-354 and CDR L1-3 of SEQ ID NO: 357-359;
[0124] l) CDR H1-3 of SEQ ID NO: 366-368 and CDR L1-3 of SEQ ID NO: 371-373;
[0125] m) CDR H1-3 of SEQ ID NO: 380-382 and CDR L1-3 of SEQ ID NO: 385-387;
[0126] n) CDR H1-3 of SEQ ID NO: 394-396 and CDR L1-3 of SEQ ID NO: 399-401;
[0127] o) CDR H1-3 of SEQ ID NO: 408-410 and CDR L1-3 of SEQ ID NO: 413-415;
[0128] p) CDR H1-3 of SEQ ID NO: 422-424 and CDR L1-3 of SEQ ID NO: 427-429;
[0129] q) CDR H1-3 of SEQ ID NO: 436-438 and CDR L1-3 of SEQ ID NO: 441-443;
[0130] r) CDR H1-3 of SEQ ID NO: 450-452 and CDR L1-3 of SEQ ID NO: 455-457;
[0131] s) CDR H1-3 of SEQ ID NO: 464-466 and CDR L1-3 of SEQ ID NO: 469-471;
[0132] t) CDR H1-3 of SEQ ID NO: 478-480 and CDR L1-3 of SEQ ID NO: 483-485;
[0133] u) CDR H1-3 of SEQ ID NO: 492-494 and CDR L1-3 of SEQ ID NO: 497-499;
[0134] v) CDR H1-3 of SEQ ID NO: 506-508 and CDR L1-3 of SEQ ID NO: 511-513;
[0135] w) CDR H1-3 of SEQ ID NO: 520-522 and CDR L1-3 of SEQ ID NO: 525-527;
[0136] x) CDR H1-3 of SEQ ID NO: 534-536 and CDR L1-3 of SEQ ID NO: 539-541;
[0137] y) CDR H1-3 of SEQ ID NO: 548-550 and CDR L1-3 of SEQ ID NO: 553-555;
[0138] z) CDR H1-3 of SEQ ID NO: 562-564 and CDR L1-3 of SEQ ID NO: 567-569;
[0139] aa) CDR H1-3 of SEQ ID NO: 576-578 and CDR L1-3 of SEQ ID NO: 581-583;
[0140] ab) CDR H1-3 of SEQ ID NO: 590-592 and CDR L1-3 of SEQ ID NO: 595-597; and
[0141] ac) CDR H1-3 of SEQ ID NO: 604-606 and CDR L1-3 of SEQ ID NO: 609-611.

[0142] A preferred group of bispecific single chain antibody molecule comprises a group of the following sequences as CDR H1, CDR H2, CDR H3, CDR L1, CDR L2 and CDR L3 in the second binding domain selected from the group consisting of:
[0143] a) CDR H1-3 of SEQ ID NO: 226-228 and CDR L1-3 of SEQ ID NO: 231-233;
[0144] b) CDR H1-3 of SEQ ID NO: 240-242 and CDR L1-3 of SEQ ID NO: 245-247;
[0145] c) CDR H1-3 of SEQ ID NO: 254-256 and CDR L1-3 of SEQ ID NO: 259-261;
[0146] d) CDR H1-3 of SEQ ID NO: 268-270 and CDR L1-3 of SEQ ID NO: 273-275; and
[0147] e) CDR H1-3 of SEQ ID NO: 618-620 and CDR L1-3 of SEQ ID NO: 623-625.

[0148] These molecules comprise a second binding domain which binds to the cell surface antigen PSMA consisting of a V_{H}-chain derived from a parent PSMA specific binding molecule and a V_{L}-chain derived from a binding molecule having a specificity for a different antigen, i.e. for the Epithelial cell adhesion molecule (EpCAM) also known as CD326. It has been surprisingly found that binding molecules with this specific combination of a V_{H}-chain derived from a parent PSMA specific binding molecule and a V_{L}-chain derived from a parent EpCAM specific binding molecule exclusively bind to PSMA but not to EpCAM. The binding specificities of this group of PSMA specific binding domains comprised in the bispecific single chain antibody molecule of the invention are described in the appended example 3.

[0149] Another preferred group of bispecific single chain antibody molecule comprises a group of the following sequences as CDR H1, CDR H2, CDR H3, CDR L1, CDR L2 and CDR L3 in the second binding domain selected from the group consisting of:
[0150] a) CDR H1-3 of SEQ ID NO: 282-284 and CDR L1-3 of SEQ ID NO: 287-289;
[0151] b) CDR H1-3 of SEQ ID NO: 296-298 and CDR L1-3 of SEQ ID NO: 301-303;
[0152] c) CDR H1-3 of SEQ ID NO: 310-312 and CDR L1-3 of SEQ ID NO: 315-317;
[0153] d) CDR H1-3 of SEQ ID NO: 324-326 and CDR L1-3 of SEQ ID NO: 329-331;
[0154] e) CDR H1-3 of SEQ ID NO: 338-341 and CDR L1-3 of SEQ ID NO: 343-345;
[0155] f) CDR H1-3 of SEQ ID NO: 352-354 and CDR L1-3 of SEQ ID NO: 357-359; and
[0156] g) CDR H1-3 of SEQ ID NO: 366-368 and CDR L1-3 of SEQ ID NO: 371-373.

[0157] Another also preferred group of bispecific single chain antibody molecule comprises a group of the following sequences as CDR H1, CDR H2, CDR H3, CDR L1, CDR L2 and CDR L3 in the second binding domain selected from the group consisting of:
[0158] a) CDR H1-3 of SEQ ID NO: 380-382 and CDR L1-3 of SEQ ID NO: 385-387;
[0159] b) CDR H1-3 of SEQ ID NO: 394-396 and CDR L1-3 of SEQ ID NO: 399-401;
[0160] c) CDR H1-3 of SEQ ID NO: 408-410 and CDR L1-3 of SEQ ID NO: 413-415;
[0161] d) CDR H1-3 of SEQ ID NO: 422-424 and CDR L1-3 of SEQ ID NO: 427-429;
[0162] e) CDR H1-3 of SEQ ID NO: 436-438 and CDR L1-3 of SEQ ID NO: 441-443;
[0163] f) CDR H1-3 of SEQ ID NO: 450-452 and CDR L1-3 of SEQ ID NO: 455-457;
[0164] g) CDR H1-3 of SEQ ID NO: 464-466 and CDR L1-3 of SEQ ID NO: 469-471;
[0165] h) CDR H1-3 of SEQ ID NO: 478-480 and CDR L1-3 of SEQ ID NO: 483-485;
[0166] i) CDR H1-3 of SEQ ID NO: 492-494 and CDR L1-3 of SEQ ID NO: 497-499;
[0167] j) CDR H1-3 of SEQ ID NO: 506-508 and CDR L1-3 of SEQ ID NO: 511-513;
[0168] k) CDR H1-3 of SEQ ID NO: 520-522 and CDR L1-3 of SEQ ID NO: 525-527;
[0169] L) CDR H1-3 of SEQ ID NO: 534-536 and CDR L1-3 of SEQ ID NO: 539-541;
[0170] m) CDR H1-3 of SEQ ID NO: 548-550 and CDR L1-3 of SEQ ID NO: 553-555;
[0171] n) CDR H1-3 of SEQ ID NO: 562-564 and CDR L1-3 of SEQ ID NO: 567-569;
[0172] o) CDR H1-3 of SEQ ID NO: 576-578 and CDR L1-3 of SEQ ID NO: 581-583;
[0173] p) CDR H1-3 of SEQ ID NO: 590-592 and CDR L1-3 of SEQ ID NO: 595-597; and
[0174] q) CDR H1-3 of SEQ ID NO: 604-606 and CDR L1-3 of SEQ ID NO: 609-611.

[0175] It is preferred for the bispecific single chain antibody molecule of the invention that the second binding domain which binds to the cell surface antigen PSMA comprises a group of the following sequences as V_{H}- and V_{L}-chains in the second binding domain selected from the group consisting of:
[0176] a) a V_{H}-chain of SEQ ID NO: 225 and a V_{L}-chain of SEQ ID NO: 230;
[0177] b) a V_{H}-chain of SEQ ID NO: 239 and a V_{L}-chain of SEQ ID NO: 244;
[0178] c) a V_{H}-chain of SEQ ID NO: 253 and a V_{L}-chain of SEQ ID NO: 258;
[0179] d) a V_{H}-chain of SEQ ID NO: 267 and a V_{L}-chain of SEQ ID NO: 272;
[0180] e) a V_{H}-chain of SEQ ID NO: 617 and a V_{L}-chain of SEQ ID NO: 622;
[0181] f) a V_{H}-chain of SEQ ID NO: 281 and a V_{L}-chain of SEQ ID NO: 286;
[0182] g) a V_{H}-chain of SEQ ID NO: 295 and a V_{L}-chain of SEQ ID NO: 300;
[0183] h) a V_{H}-chain of SEQ ID NO: 309 and a V_{L}-chain of SEQ ID NO: 314;
[0184] i) a V_{H}-chain of SEQ ID NO: 323 and a V_{L}-chain of SEQ ID NO: 328;
[0185] j) a V_{H}-chain of SEQ ID NO: 337 and a V_{L}-chain of SEQ ID NO: 342;
[0186] k) a V_{H}-chain of SEQ ID NO: 351 and a V_{L}-chain of SEQ ID NO: 356;
[0187] l) a V_{H}-chain of SEQ ID NO: 365 and a V_{L}-chain of SEQ ID NO: 370;
[0188] m) a V_{H}-chain of SEQ ID NO: 379 and a V_{L}-chain of SEQ ID NO: 384;
[0189] n) a V_{H}-chain of SEQ ID NO: 393 and a V_{L}-chain of SEQ ID NO: 398;
[0190] o) a V_{H}-chain of SEQ ID NO: 407 and a V_{L}-chain of SEQ ID NO: 412;
[0191] p) a V_{H}-chain of SEQ ID NO: 421 and a V_{L}-chain of SEQ ID NO: 426;
[0192] q) a V_{H}-chain of SEQ ID NO: 435 and a V_{L}-chain of SEQ ID NO: 440;
[0193] r) a V_{H}-chain of SEQ ID NO: 449 and a V_{L}-chain of SEQ ID NO: 454;
[0194] s) a V_{H}-chain of SEQ ID NO: 463 and a V_{L}-chain of SEQ ID NO: 468;
[0195] t) a V_{H}-chain of SEQ ID NO: 477 and a V_{L}-chain of SEQ ID NO: 482;
[0196] u) a V_{H}-chain of SEQ ID NO: 491 and a V_{L}-chain of SEQ ID NO: 496;
[0197] v) a V_{H}-chain of SEQ ID NO: 505 and a V_{L}-chain of SEQ ID NO: 510;
[0198] w) a V_{H}-chain of SEQ ID NO: 519 and a V_{L}-chain of SEQ ID NO: 524;
[0199] x) a V_{H}-chain of SEQ ID NO: 533 and a V_{L}-chain of SEQ ID NO: 538;
[0200] y) a V_{H}-chain of SEQ ID NO: 547 and a V_{L}-chain of SEQ ID NO: 552;
[0201] z) a V_{H}-chain of SEQ ID NO: 561 and a V_{L}-chain of SEQ ID NO: 566;
[0202] aa) a V_{H}-chain of SEQ ID NO: 575 and a V_{L}-chain of SEQ ID NO: 580;
[0203] ab) a V_{H}-chain of SEQ ID NO: 589 and a V_{L}-chain of SEQ ID NO: 594; and
[0204] ac) a V_{H}-chain of SEQ ID NO: 603 and a V_{L}-chain of SEQ ID NO: 608.

[0205] The above V_{H}- and V_{L}-chains are also shown in SEQ ID NOs: 235, 249, 263, 277, 627, 291, 305, 319, 333, 347, 361, 375, 389, 403, 417, 431, 445, 459, 473, 487, 501, 515, 529, 543, 557, 571, 585, 599 and 613, respectively.

[0206] The sequences (amino acid sequence and nucleotide sequence) of the corresponding VL- and VH-regions of the second binding domain of the bispecific single chain antibody molecule of the invention as well as of the respective scFvs are shown in the sequence listing.

[0207] In the bispecific single chain antibody molecule of the invention the binding domains are arranged in the order VL-VH-VH-VL, VL-VH-VL-VH, VH-VL-VH-VL or VH-VL-VL-VH, as exemplified in the appended examples. Preferably, the binding domains are arranged in the order VH PSMA-VL PSMA-VH CD3-VL CD3 or VL PSMA-VH PSMA-VH CD3-VL CD3.

[0208] A particularly preferred embodiment of the invention concerns an above characterized polypeptide, wherein the bispecific single chain antibody molecule comprises a sequence selected from:
[0209] (a) an amino acid sequence as depicted in any of SEQ ID NOs: 237, 251, 265, 279, 629, 293, 307, 321, 335, 349, 363, 377, 391, 405, 419, 433, 447, 461, 475, 489, 503, 517, 531, 545, 559, 573, 587, 601 or 615;
[0210] (b) an amino acid sequence encoded by a nucleic acid sequence as depicted in any of SEQ ID NOs: 238, 252, 266, 280, 630, 294, 308, 322, 336, 350, 364, 378, 392, 406, 420, 434, 448, 462, 476, 490, 504, 518, 532, 546, 560, 574, 588, 602 or 616.

[0211] The invention relates to a bispecific single chain antibody molecule comprising an amino acid sequence as depicted in any of SEQ ID NOs: 237, 251, 265, 279, 629, 293, 307, 321, 335, 349, 363, 377, 391, 405, 419, 433, 447, 461, 475, 489, 503, 517, 531, 545, 559, 573, 587, 601 or 615, as well as to amino acid sequences at least 96% identical, preferably 97%, more preferred at least 98% identical, most preferred at least 99% identical to the amino acid sequence of SEQ ID NOs: 237, 251, 265, 279, 629, 293, 307, 321, 335, 349, 363, 377, 391, 405, 419, 433, 447, 461, 475, 489, 503, 517, 531, 545, 559, 573, 587, 601 or 615. The invention relates also to the corresponding nucleic acid sequences as depicted in any of SEQ ID NOs: 238, 252, 266, 280, 630, 294, 308, 322, 336, 350, 364, 378, 392, 406, 420, 434, 448, 462, 476, 490, 504, 518, 532, 546, 560, 574, 588, 602 or 616 as well as to nucleic acid sequences at least 96% identical, preferably 97%, more preferred at least 98 identical, most preferred at least 99% identical to the nucleic acid sequences shown in SEQ ID NOs: 238, 252, 266, 280, 630, 294, 308, 322, 336, 350, 364, 378, 392, 406, 420, 434, 448, 462, 476, 490, 504, 518, 532, 546, 560, 574, 588, 602 or 616. It is to be understood that the sequence identity is determined over the entire nucleotide or amino acid sequence. For sequence alignments, for example, the programs Gap or BestFit can be used (Needleman and Wunsch J. Mol. Biol. 48 (1970), 443-453; Smith and Waterman, Adv. Appl. Math 2 (1981), 482-489), which is contained in the GCG software package (Genetics Computer Group, 575 Science Drive, Madison, Wis., USA 53711 (1991). It is a routine method for those skilled in the art to determine and identify a nucleotide or amino acid sequence having e.g. 96% (97%, 98% or 99%) sequence identity to the nucleotide or amino acid sequences of the bispecific single single chain antibody of the invention by using e.g. one of the above mentioned programs. For example, according to Crick's Wobble hypothesis, the 5′ base on the anti-codon is not as spatially confined as the other two bases, and could thus have non-standard base pairing. Put in other words: the third position in a codon triplet may vary so that two triplets which differ in this third position may encode the same amino acid residue. Said hypothesis is well known to the person skilled in the art (see e.g. http://en.wikipedia.org/wiki/Wobble_Hypothesis; Crick, J Mol Biol 19 (1966): 548-55).

[0212] Preferred domain arrangements in the PSMAxCD3 bispecific single chain antibody constructs of the invention are shown in the following examples.

[0213] In a preferred embodiment of the invention, the bispecific single chain antibodies are cross-species specific for CD3 epsilon and for the human and non-chimpanzee primate cell surface antigen PSMA, recognized by their second binding domain.

[0214] In an alternative embodiment the present invention provides a nucleic acid sequence encoding an above described bispecific single chain antibody molecule of the invention.

[0215] The present invention also relates to a vector comprising the nucleic acid molecule of the present invention.

[0216] Many suitable vectors are known to those skilled in molecular biology, the choice of which would depend on the function desired and include plasmids, cosmids, viruses, bacteriophages and other vectors used conventionally in genetic engineering. Methods which are well known to those skilled in the art can be used to construct various plasmids and vectors; see, for example, the techniques described in Sambrook et al. (loc cit.) and Ausubel, Current Protocols in Molecular Biology, Green Publishing Associates and Wiley Interscience, N.Y. (1989), (1994). Alternatively, the polynucleotides and vectors of the invention can be reconstituted into liposomes for delivery to target cells. As discussed in further details below, a cloning vector was used to isolate individual sequences of DNA. Relevant sequences can be transferred into expression vectors where expression of a particular polypeptide is required. Typical cloning vectors include pBluescript SK, pGEM, pUC9, pBR322 and pGBT9. Typical expression vectors include pTRE, pCAL-n-EK, pESP-1, pOP13CAT.

[0217] Preferably said vector comprises a nucleic acid sequence which is a regulatory sequence operably linked to said nucleic acid sequence defined herein.

[0218] The term “regulatory sequence” refers to DNA sequences, which are necessary to effect the expression of coding sequences to which they are ligated. The nature of such control sequences differs depending upon the host organism. In prokaryotes, control sequences generally include promoter, ribosomal binding site, and terminators. In eukaryotes generally control sequences include promoters, terminators and, in some instances, enhancers, transactivators or transcription factors. The term “control sequence” is intended to include, at a minimum, all components the presence of which are necessary for expression, and may also include additional advantageous components.

[0219] The term “operably linked” refers to a juxtaposition wherein the components so described are in a relationship permitting them to function in their intended manner. A control sequence “operably linked” to a coding sequence is ligated in such a way that expression of the coding sequence is achieved under conditions compatible with the control sequences. In case the control sequence is a promoter, it is obvious for a skilled person that double-stranded nucleic acid is preferably used.

[0220] Thus, the recited vector is preferably an expression vector. An “expression vector” is a construct that can be used to transform a selected host and provides for expression of a coding sequence in the selected host. Expression vectors can for instance be cloning vectors, binary vectors or integrating vectors. Expression comprises transcription of the nucleic acid molecule preferably into a translatable mRNA. Regulatory elements ensuring expression in prokaryotes and/or eukaryotic cells are well known to those skilled in the art. In the case of eukaryotic cells they comprise normally promoters ensuring initiation of transcription and optionally poly-A signals ensuring termination of transcription and stabilization of the transcript. Possible regulatory elements permitting expression in prokaryotic host cells comprise, e.g., the P_{L}, lac, trp or tac promoter in E. coli, and examples of regulatory elements permitting expression in eukaryotic host cells are the AOX1 or GAL1 promoter in yeast or the CMV-, SV40-, RSV-promoter (Rous sarcoma virus), CMV-enhancer, SV40-enhancer or a globin intron in mammalian and other animal cells.

[0221] Beside elements, which are responsible for the initiation of transcription such regulatory elements may also comprise transcription termination signals, such as the SV40-poly-A site or the tk-poly-A site, downstream of the polynucleotide. Furthermore, depending on the expression system used leader sequences capable of directing the polypeptide to a cellular compartment or secreting it into the medium may be added to the coding sequence of the recited nucleic acid sequence and are well known in the art; see e.g. WO 2008/119567. The leader sequence(s) is (are) assembled in appropriate phase with translation, initiation and termination sequences, and preferably, a leader sequence capable of directing secretion of translated protein, or a portion thereof, into the periplasmic space or extracellular medium. Optionally, the heterologous sequence can encode a fusion protein including an N-terminal identification peptide imparting desired characteristics, e.g., stabilization or simplified purification of expressed recombinant product; see supra. In this context, suitable expression vectors are known in the art such as Okayama-Berg cDNA expression vector pcDV1 (Pharmacia), pCDM8, pRc/CMV, pcDNA1, pcDNA3 (In-vitrogene), pEF-DHFR, pEF-ADA or pEF-neo (Mack et al. PNAS (1995) 92, 7021-7025 and Raum et al. Cancer Immunol Immunother (2001) 50(3), 141-150) or pSPORT1 (GIBCO BRL).

[0222] Preferably, the expression control sequences will be eukaryotic promoter systems in vectors capable of transforming of transfecting eukaryotic host cells, but control sequences for prokaryotic hosts may also be used. Once the vector has been incorporated into the appropriate host, the host is maintained under conditions suitable for high level expression of the nucleotide sequences, and as desired, the collection and purification of the bispecific single chain antibody molecule of the invention may follow; see, e.g., the appended examples.

[0223] An alternative expression system, which can be used to express a cell cycle interacting protein is an insect system. In one such system, Autographa californica nuclear polyhedrosis virus (AcNPV) is used as a vector to express foreign genes in Spodoptera frugiperda cells or in Trichoplusia larvae. The coding sequence of a recited nucleic acid molecule may be cloned into a nonessential region of the virus, such as the polyhedrin gene, and placed under control of the polyhedrin promoter. Successful insertion of said coding sequence will render the polyhedrin gene inactive and produce recombinant virus lacking coat protein coat. The recombinant viruses are then used to infect S. frugiperda cells or Trichoplusia larvae in which the protein of the invention is expressed (Smith, J. Virol. 46 (1983), 584; Engelhard, Proc. Nat. Acad. Sci. USA 91 (1994), 3224-3227).

[0224] Additional regulatory elements may include transcriptional as well as translational enhancers. Advantageously, the above-described vectors of the invention comprise a selectable and/or scorable marker.

[0225] Selectable marker genes useful for the selection of transformed cells and, e.g., plant tissue and plants are well known to those skilled in the art and comprise, for example, antimetabolite resistance as the basis of selection for dhfr, which confers resistance to methotrexate (Reiss, Plant Physiol. (Life Sci. Adv.) 13 (1994), 143-149); npt, which confers resistance to the aminoglycosides neomycin, kanamycin and paromycin (Herrera-Estrella, EMBO J. 2 (1983), 987-995) and hygro, which confers resistance to hygromycin (Marsh, Gene 32 (1984), 481-485). Additional selectable genes have been described, namely trpB, which allows cells to utilize indole in place of tryptophan; hisD, which allows cells to utilize histinol in place of histidine (Hartman, Proc. Natl. Acad. Sci. USA 85 (1988), 8047); mannose-6-phosphate isomerase which allows cells to utilize mannose (WO 94/20627) and ODC (ornithine decarboxylase) which confers resistance to the ornithine decarboxylase inhibitor, 2-(difluoromethyl)-DL-ornithine, DFMO (McConlogue, 1987, In: Current Communications in Molecular Biology, Cold Spring Harbor Laboratory ed.) or deaminase from Aspergillus terreus which confers resistance to Blasticidin S (Tamura, Biosci. Biotechnol. Biochem. 59 (1995), 2336-2338).

[0226] Useful scorable markers are also known to those skilled in the art and are commercially available. Advantageously, said marker is a gene encoding luciferase (Giacomin, Pl. Sci. 116 (1996), 59-72; Scikantha, J. Bact. 178 (1996), 121), green fluorescent protein (Gerdes, FEBS Lett. 389 (1996), 44-47) or β-glucuronidase (Jefferson, EMBO J. 6 (1987), 3901-3907). This embodiment is particularly useful for simple and rapid screening of cells, tissues and organisms containing a recited vector.

[0227] As described above, the recited nucleic acid molecule can be used alone or as part of a vector to express the bispecific single chain antibody molecule of the invention in cells, for, e.g., purification but also for gene therapy purposes. The nucleic acid molecules or vectors containing the DNA sequence(s) encoding any one of the above described bispecific single chain antibody molecule of the invention is introduced into the cells which in turn produce the polypeptide of interest. Gene therapy, which is based on introducing therapeutic genes into cells by ex-vivo or in-vivo techniques is one of the most important applications of gene transfer. Suitable vectors, methods or gene-delivery systems for in-vitro or in-vivo gene therapy are described in the literature and are known to the person skilled in the art; see, e.g., Giordano, Nature Medicine 2 (1996), 534-539; Schaper, Circ. Res. 79 (1996), 911-919; Anderson, Science 256 (1992), 808-813; Verma, Nature 389 (1994), 239; Isner, Lancet 348 (1996), 370-374; Muhlhauser, Circ. Res. 77 (1995), 1077-1086; Onodera, Blood 91 (1998), 30-36; Verma, Gene Ther. 5 (1998), 692-699; Nabel, Ann. N.Y. Acad. Sci. 811 (1997), 289-292; Verzeletti, Hum. Gene Ther. 9 (1998), 2243-51; Wang, Nature Medicine 2 (1996), 714-716; WO 94/29469; WO 97/00957, U.S. Pat. No. 5,580,859; U.S. Pat. No. 5,589,466; or Schaper, Current Opinion in Biotechnology 7 (1996), 635-640; dos Santos Coura and Nardi Virol J. (2007), 4:99. The recited nucleic acid molecules and vectors may be designed for direct introduction or for introduction via liposomes, or viral vectors (e.g., adenoviral, retroviral) into the cell. Preferably, said cell is a germ line cell, embryonic cell, or egg cell or derived there from, most preferably said cell is a stem cell. An example for an embryonic stem cell can be, inter alia, a stem cell as described in Nagy, Proc. Natl. Acad. Sci. USA 90 (1993), 8424-8428.

[0228] The invention also provides for a host transformed or transfected with a vector of the invention. Said host may be produced by introducing the above described vector of the invention or the above described nucleic acid molecule of the invention into the host. The presence of at least one vector or at least one nucleic acid molecule in the host may mediate the expression of a gene encoding the above described single chain antibody constructs.

[0229] The described nucleic acid molecule or vector of the invention, which is introduced in the host may either integrate into the genome of the host or it may be maintained extrachromosomally.

[0230] The host can be any prokaryote or eukaryotic cell.

[0231] The term “prokaryote” is meant to include all bacteria, which can be transformed or transfected with DNA or RNA molecules for the expression of a protein of the invention. Prokaryotic hosts may include gram negative as well as gram positive bacteria such as, for example, E. coli, S. typhimurium, Serratia marcescens and Bacillus subtilis. The term “eukaryotic” is meant to include yeast, higher plant, insect and preferably mammalian cells. Depending upon the host employed in a recombinant production procedure, the protein encoded by the polynucleotide of the present invention may be glycosylated or may be non-glycosylated. Especially preferred is the use of a plasmid or a virus containing the coding sequence of the bispecific single chain antibody molecule of the invention and genetically fused thereto an N-terminal FLAG-tag and/or C-terminal His-tag. Preferably, the length of said FLAG-tag is about 4 to 8 amino acids, most preferably 8 amino acids. An above described polynucleotide can be used to transform or transfect the host using any of the techniques commonly known to those of ordinary skill in the art. Furthermore, methods for preparing fused, operably linked genes and expressing them in, e.g., mammalian cells and bacteria are well-known in the art (Sambrook, loc cit.). Preferably, said the host is a bacterium or an insect, fungal, plant or animal cell.

[0232] It is particularly envisaged that the recited host may be a mammalian cell. Particularly preferred host cells comprise CHO cells, COS cells, myeloma cell lines like SP2/0 or NS/0. As illustrated in the examples of WO 2008/119567 for other molecules of the same class, particularly preferred are CHO-cells as hosts.

[0233] More preferably said host cell is a human cell or human cell line, e.g. per.c6 (Kroos, Biotechnol. Prog., 2003, 19:163-168).

[0234] In a further embodiment, the present invention thus relates to a process for the production of a bispecific single chain antibody molecule of the invention, said process comprising culturing a host of the invention under conditions allowing the expression of the bispecific single chain antibody molecule of the invention and recovering the produced polypeptide from the culture.

[0235] The transformed hosts can be grown in fermentors and cultured according to techniques known in the art to achieve optimal cell growth. The bispecific single chain antibody molecule of the invention can then be isolated from the growth medium, cellular lysates, or cellular membrane fractions. The isolation and purification of the, e.g., microbially expressed bispecific single chain antibody molecules may be by any conventional means such as, for example, preparative chromatographic separations and immunological separations such as those involving the use of monoclonal or polyclonal antibodies directed, e.g., against a tag of the bispecific single chain antibody molecule of the invention or as described in the appended examples.

[0236] The conditions for the culturing of a host, which allow the expression are known in the art to depend on the host system and the expression system/vector used in such process. The parameters to be modified in order to achieve conditions allowing the expression of a recombinant polypeptide are known in the art. Thus, suitable conditions can be determined by the person skilled in the art in the absence of further inventive input.

[0237] Once expressed, the bispecific single chain antibody molecule of the invention can be purified according to standard procedures of the art, including ammonium sulfate precipitation, affinity columns, column chromatography, gel electrophoresis and the like; see, Scopes, “Protein Purification”, Springer-Verlag, N.Y. (1982). Substantially pure polypeptides of at least about 90 to 95% homogeneity are preferred, and 98 to 99% or more homogeneity are most preferred, for pharmaceutical uses. Once purified, partially or to homogeneity as desired, the bispecific single chain antibody molecule of the invention may then be used therapeutically (including extracorporeally) or in developing and performing assay procedures. Furthermore, examples for methods for the recovery of the bispecific single chain antibody molecule of the invention from a culture are described in detail in the appended examples of WO 2008/119567 for other molecules of the same class. The recovery can also be achieved by a method for the isolation of the bispecific single chain antibody molecule of the invention capable of binding to an epitope of human and non-chimpanzee primate CD3 epsilon (CD3ε□, the method comprising the steps of:
[0238] (a) contacting the polypeptide(s) with an N-terminal fragment of the extracellular domain of CD3ε of maximal 27 amino acids comprising the amino acid sequence Gln-Asp-Gly-Asn-Glu-Glu-Met-Gly (SEQ ID NO. 211) or Gln-Asp-Gly-Asn-Glu-Glu-Ile-Gly (SEQ ID NO. 212), fixed via its C-terminus to a solid phase;
[0239] (b) eluting the bound polypeptide(s) from said fragment; and
[0240] (c) isolating the polypeptide(s) from the eluate of (b).

[0241] It is preferred that the polypeptide(s) isolated by the above method of the invention are of human origin.

[0242] This method or the isolation of the bispecific single chain antibody molecule of the invention is understood as a method for the isolation of one or more different polypeptides with the same specificity for the fragment of the extracellular domain of CD3ε comprising at its N-terminus the amino acid sequence Gln-Asp-Gly-Asn-Glu-Glu-Met-Gly (SEQ ID NO. 211) or Gln-Asp-Gly-Asn-Glu-Glu-Ile-Gly (SEQ ID NO. 212) from a plurality of polypeptide candidates as well as a method for the purification of a polypeptide from a solution. A non-limiting example for the latter method for the purification of a bispecific single chain antibody molecule from a solution is e.g. the purification of a recombinantly expressed bispecific single chain antibody molecule from a culture supernatant or a preparation from such culture.

[0243] As stated above the fragment used in this method is an N-terminal fragment of the extracellular domain of the primate CD3ε molecule. The amino acid sequence of the extracellular domain of the CD3ε molecule of different species is depicted in SEQ ID NOs: 1, 3, 5 and 7. The two forms of the N-terminal octamer are depicted in SEQ ID NOs: 211 and 212. It is preferred that this N-terminus is freely available for binding of the polypeptides to be identified by the method of the invention. The term “freely available” is understood in the context of the invention as free of additional motives such as a His-tag. The interference of such a His-tag with a binding molecule described herein is described in WO 2008/119567.

[0244] According to this method said fragment is fixed via its C-terminus to a solid phase.

[0245] The person skilled in the art will easily and without any inventive ado elect a suitable solid phase support dependent from the used embodiment of the method of the invention. Examples for a solid support comprise but are not limited to matrices like beads (e.g. agarose beads, sepharose beads, polystyrol beads, dextran beads), plates (culture plates or MultiWell plates) as well as chips known e.g. from Biacore®. The selection of the means and methods for the fixation/immobilization of the fragment to said solid support depend on the election of the solid support. A commonly used method for the fixation/immobilization is a coupling via an N-hydroxysuccinimide (NHS) ester. The chemistry underlying this coupling as well as alternative methods for the fixation/immobilization are known to the person skilled in the art, e.g. from Hermanson “Bioconjugate Techniques”, Academic Press, Inc. (1996). For the fixation to/immobilization on chromatographic supports the following means are commonly used: NHS-activated sepharose (e.g. HiTrap-NHS of GE Life Science-Amersham), CnBr-activated sepharose (e.g. GE Life Science-Amersham), NHS-activated dextran beads (Sigma) or activated polymethacrylate. These reagents may also be used in a batch approach. Moreover, dextran beads comprising iron oxide (e.g. available from Miltenyi) may be used in a batch approach. These beads may be used in combination with a magnet for the separation of the beads from a solution. Polypeptides can be immobilized on a Biacore chip (e.g. CM5 chips) by the use of NHS activated carboxymethyldextran. Further examples for an appropriate solid support are amine reactive MultiWell plates (e.g. Nunc Immobilizer™ plates). According to this method said fragment of the extracellular domain of CD3 epsilon can be directly coupled to the solid support or via a stretch of amino acids, which might be a linker or another protein/polypeptide moiety. Alternatively, the extracellular domain of CD3 epsilon can be indirectly coupled via one or more adaptor molecule(s).

[0246] Means and methods for the eluation of a peptide or polypeptide bound to an immobilized epitope are well known in the art. The same holds true for methods for the isolation of the identified polypeptide(s) from the eluate.

[0247] A method for the isolation of one or more different bispecific single chain antibody molecule(s) with the same specificity for the fragment of the extracellular domain of CD3ε comprising at its N-terminus the amino acid sequence Gln-Asp-Gly-Asn-Glu-Glu-X-Gly (with X being Met or Ile) from a plurality of polypeptide candidates may comprise one or more steps of the following methods for the selection of antigen-specific entities:

[0248] CD3ε specific binding domains can be selected from antibody derived repertoires. A phage display library can be constructed based on standard procedures, as for example disclosed in “Phage Display: A Laboratory Manual”; Ed. Barbas, Burton, Scott & Silverman; Cold Spring Harbor Laboratory Press, 2001. The format of the antibody fragments in the antibody library can be scFv, but may generally also be a Fab fragment or even a single domain antibody fragment. For the isolation of antibody fragments naïve antibody fragment libraries may be used. For the selection of potentially low immunogenic binding entities in later therapeutic use, human antibody fragment libraries may be favourable for the direct selection of human antibody fragments. In some cases they may form the basis for synthetic antibody libraries (Knappik et al. J. Mol. Biol. 2000, 296:57 ff). The corresponding format may be Fab, scFv (as described below) or domain antibodies (dAbs, as reviewed in Holt et al., Trends Biotechnol. 2003, 21:484 ff).

[0249] It is also known in the art that in many cases there is no immune human antibody source available against the target antigen. Therefore animals are immunized with the target antigen and the respective antibody libraries isolated from animal tissue as e.g. spleen or PBMCs. The N-terminal fragment may be biotinylated or covalently linked to proteins like KLH or bovine serum albumin (BSA). According to common approaches rodents are used for immunization. Some immune antibody repertoires of non-human origin may be especially favourable for other reasons, e.g. for the presence of single domain antibodies (VHH) derived from cameloid species (as described in Muyldermans, J. Biotechnol. 74:277; De Genst et al. Dev Como Immunol. 2006, 30:187 ff). Therefore a corresponding format of the antibody library may be Fab, scFv (as described below) or single domain antibodies (VHH).

[0250] In one possible approach ten weeks old F1 mice from balb/c×C57black crossings can be immunized with whole cells e.g. expressing transmembrane EpCAM N-terminally displaying as translational fusion the N-terminal amino acids 1 to 27 of the mature CD3ε chain. Alternatively, mice can be immunized with 1-27 CD3 epsilon-Fc fusion protein (a corresponding approach is described in the examples of WO 2008/119567). After booster immunization(s), blood samples can be taken and antibody serum titer against the CD3-positive T cells can be tested e.g. in FACS analysis. Usually, serum titers are significantly higher in immunized than in non-immunized animals.

[0251] Immunized animals may form the basis for the construction of immune antibody libraries. Examples of such libraries comprise phage display libraries. Such libraries may be generally constructed based on standard procedures, as for example disclosed in “Phage Display: A Laboratory Manual”; Ed. Barbas, Burton, Scott & Silverman; Cold Spring Harbor Laboratory Press, 2001.

[0252] The non-human antibodies can also be humanized via phage display due to the generation of more variable antibody libraries that can be subsequently enriched for binders during selection.

[0253] In a phage display approach any one of the pools of phages that displays the antibody libraries forms a basis to select binding entities using the respective antigen as target molecule. The central step in which antigen specific, antigen bound phages are isolated is designated as panning. Due to the display of the antibody fragments on the surface of the phages, this general method is called phage display. One preferred method of selection is the use of small proteins such as the filamentous phage N2 domain translationally fused to the N-terminus of the scFv displayed by the phage. Another display method known in the art, which may be used to isolate binding entities is the ribosome display method (reviewed in Groves & Osbourn, Expert Opin Biol Ther. 2005, 5:125 ff; Lipovsek & Pluckthun, J Immunol Methods 2004, 290:52 ff). In order to demonstrate binding of scFv phage particles to a 1-27 CD3ε-Fc fusion protein a phage library carrying the cloned scFv-repertoire can be harvested from the respective culture supernatant by PEG (polyethyleneglycole). ScFv phage particles may be incubated with immobilized CD3ε Fc fusion protein. The immobilized CD3ε Fc fusion protein may be coated to a solid phase. Binding entities can be eluted and the eluate can be used for infection of fresh uninfected bacterial hosts. Bacterial hosts successfully transduced with a phagemid copy, encoding a human scFv-fragment, can be selected again for carbenicillin resistance and subsequently infected with e.g. VCMS 13 helper phage to start the second round of antibody display and in vitro selection. A total of 4 to 5 rounds of selections is carried out, normally. The binding of isolated binding entities can be tested on CD3 epsilon positive Jurkat cells, HPBall cells, PBMCs or transfected eukaryotic cells that carry the N-terminal CD3ε sequence fused to surface displayed EpCAM using a flow cytometric assay (see WO 2008/119567).

[0254] Preferably, the above method may be a method, wherein the fragment of the extracellular domain of CD3ε consists of one or more fragments of a polypeptide having an amino acid sequence of any one depicted in SEQ ID NOs. 2, 4, 6 or 8. More preferably, said fragment is 8, 9, 10, 11, 12, 13, 14, 15, 16, 17, 18, 19, 20, 21, 22, 23, 24, 25, 26, 27 amino acid residues in length.

[0255] This method of identification of a bispecific single chain antibody molecule may be a method of screening a plurality of bispecific single chain antibody molecules comprising a cross-species specific binding domain binding to an epitope of human and non-chimpanzee primate CD3ε. Alternatively, the method of identification is a method of purification/isolation of a bispecific single chain antibody molecule comprising a cross-species specific binding domain binding to an epitope of human and non-chimpanzee primate CD3ε.

[0256] Furthermore, the invention provides for a composition comprising a bispecific single chain antibody molecule of the invention or a bispecific single chain antibody as produced by the process disclosed above. Preferably, said composition is a pharmaceutical composition.

[0257] The invention provides also for a bispecific single chain antibody molecule as defined herein, or produced according to the process as defined herein, wherein said bispecific single chain antibody molecule is for use in the prevention, treatment or amelioration of cancer. Preferably, said cancer is a solid tumor, more preferably a carcinoma or prostate cancer. It is preferred that the bispecific single chain is further comprising suitable formulations of carriers, stabilizers and/or excipients. Moreover, it is preferred that said bispecific single chain antibody molecule is suitable to be administered in combination with an additional drug. Said drug may be a non-proteinaceous compound or a proteinaceous compound and may be administered simultaneously or non-simultaneously with the bispecific single chain antibody molecule as defined herein.

[0258] In accordance with the invention, the term “pharmaceutical composition” relates to a composition for administration to a patient, preferably a human patient. The particular preferred pharmaceutical composition of this invention comprises bispecific single chain antibodies directed against and generated against context-independent CD3 epitopes. Preferably, the pharmaceutical composition comprises suitable formulations of carriers, stabilizers and/or excipients. In a preferred embodiment, the pharmaceutical composition comprises a composition for parenteral, transdermal, intraluminal, intraarterial, intrathecal and/or intranasal administration or by direct injection into tissue. It is in particular envisaged that said composition is administered to a patient via infusion or injection. Administration of the suitable compositions may be effected by different ways, e.g., by intravenous, intraperitoneal, subcutaneous, intramuscular, topical or intradermal administration. In particular, the present invention provides for an uninterrupted administration of the suitable composition. As a non-limiting example, uninterrupted, i.e. continuous administration may be realized by a small pump system worn by the patient for metering the influx of therapeutic agent into the body of the patient. The pharmaceutical composition comprising the bispecific single chain antibodies directed against and generated against context-independent CD3 epitopes of the invention can be administered by using said pump systems. Such pump systems are generally known in the art, and commonly rely on periodic exchange of cartridges containing the therapeutic agent to be infused. When exchanging the cartridge in such a pump system, a temporary interruption of the otherwise uninterrupted flow of therapeutic agent into the body of the patient may ensue. In such a case, the phase of administration prior to cartridge replacement and the phase of administration following cartridge replacement would still be considered within the meaning of the pharmaceutical means and methods of the invention together make up one “uninterrupted administration” of such therapeutic agent.

[0259] The continuous or uninterrupted administration of these bispecific single chain antibodies directed against and generated against context-independent CD3 epitopes of this invention may be intravenuous or subcutaneous by way of a fluid delivery device or small pump system including a fluid driving mechanism for driving fluid out of a reservoir and an actuating mechanism for actuating the driving mechanism. Pump systems for subcutaneous administration may include a needle or a cannula for penetrating the skin of a patient and delivering the suitable composition into the patient's body. Said pump systems may be directly fixed or attached to the skin of the patient independently of a vein, artery or blood vessel, thereby allowing a direct contact between the pump system and the skin of the patient. The pump system can be attached to the skin of the patient for 24 hours up to several days. The pump system may be of small size with a reservoir for small volumes. As a non-limiting example, the volume of the reservoir for the suitable pharmaceutical composition to be administered can be between 0.1 and 50 ml.

[0260] The continuous administration may be transdermal by way of a patch worn on the skin and replaced at intervals. One of skill in the art is aware of patch systems for drug delivery suitable for this purpose. It is of note that transdermal administration is especially amenable to uninterrupted administration, as exchange of a first exhausted patch can advantageously be accomplished simultaneously with the placement of a new, second patch, for example on the surface of the skin immediately adjacent to the first exhausted patch and immediately prior to removal of the first exhausted patch. Issues of flow interruption or power cell failure do not arise.

[0261] The composition of the present invention, comprising in particular bispecific single chain antibodies directed against and generated against context-independent CD3 epitopes may further comprise a pharmaceutically acceptable carrier. Examples of suitable pharmaceutical carriers are well known in the art and include solutions, e.g. phosphate buffered saline solutions, water, emulsions, such as oil/water emulsions, various types of wetting agents, sterile solutions, liposomes, etc. Compositions comprising such carriers can be formulated by well known conventional methods. Formulations can comprise carbohydrates, buffer solutions, amino acids and/or surfactants. Carbohydrates may be non-reducing sugars, preferably trehalose, sucrose, octasulfate, sorbitol or xylitol. Such formulations may be used for continuous administrations which may be intravenuous or subcutaneous with and/or without pump systems. Amino acids may be charged amino acids, preferably lysine, lysine acetate, arginine, glutamate and/or histidine. Surfactants may be detergents, preferably with a molecular weight of >1.2 KD and/or a polyether, preferably with a molecular weight of >3 KD. Non-limiting examples for preferred detergents are Tween 20, Tween 40, Tween 60, Tween 80 or Tween 85. Non-limiting examples for preferred polyethers are PEG 3000, PEG 3350, PEG 4000 or PEG 5000. Buffer systems used in the present invention can have a preferred pH of 5-9 and may comprise citrate, succinate, phosphate, histidine and acetate. The compositions of the present invention can be administered to the subject at a suitable dose which can be determined e.g. by dose escalating studies by administration of increasing doses of the bispecific single chain antibody molecule of the invention exhibiting cross-species specificity described herein to non-chimpanzee primates, for instance macaques. As set forth above, the bispecific single chain antibody molecule of the invention exhibiting cross-species specificity described herein can be advantageously used in identical form in preclinical testing in non-chimpanzee primates and as drug in humans. These compositions can also be administered in combination with other proteinaceous and non-proteinaceous drugs. These drugs may be administered simultaneously with the composition comprising the bispecific single chain antibody molecule of the invention as defined herein or separately before or after administration of said polypeptide in timely defined intervals and doses. The dosage regimen will be determined by the attending physician and clinical factors. As is well known in the medical arts, dosages for any one patient depend upon many factors, including the patient's size, body surface area, age, the particular compound to be administered, sex, time and route of administration, general health, and other drugs being administered concurrently. Preparations for parenteral administration include sterile aqueous or non-aqueous solutions, suspensions, and emulsions. Examples of non-aqueous solvents are propylene glycol, polyethylene glycol, vegetable oils such as olive oil, and injectable organic esters such as ethyl oleate. Aqueous carriers include water, alcoholic/aqueous solutions, emulsions or suspensions, including saline and buffered media. Parenteral vehicles include sodium chloride solution, Ringer's dextrose, dextrose and sodium chloride, lactated Ringer's, or fixed oils. Intravenous vehicles include fluid and nutrient replenishers, electrolyte replenishers (such as those based on Ringer's dextrose), and the like. Preservatives and other additives may also be present such as, for example, antimicrobials, anti-oxidants, chelating agents, inert gases and the like. In addition, the composition of the present invention might comprise proteinaceous carriers, like, e.g., serum albumin or immunoglobulin, preferably of human origin. It is envisaged that the composition of the invention might comprise, in addition to the bispecific single chain antibody molecule of the invention defined herein, further biologically active agents, depending on the intended use of the composition. Such agents might be drugs acting on the gastro-intestinal system, drugs acting as cytostatica, drugs preventing hyperurikemia, drugs inhibiting immunoreactions (e.g. corticosteroids), drugs modulating the inflammatory response, drugs acting on the circulatory system and/or agents such as cytokines known in the art.

[0262] The biological activity of the pharmaceutical composition defined herein can be determined for instance by cytotoxicity assays, as described in the following examples, in WO 99/54440 or by Schlereth et al. (Cancer Immunol. Immunother. 20 (2005), 1-12). “Efficacy” or “in vivo efficacy” as used herein refers to the response to therapy by the pharmaceutical composition of the invention, using e.g. standardized NCl response criteria. The success or in vivo efficacy of the therapy using a pharmaceutical composition of the invention refers to the effectiveness of the composition for its intended purpose, i.e. the ability of the composition to cause its desired effect, i.e. depletion of pathologic cells, e.g. tumor cells. The in vivo efficacy may be monitored by established standard methods for the respective disease entities including, but not limited to white blood cell counts, differentials, Fluorescence Activated Cell Sorting, bone marrow aspiration. In addition, various disease specific clinical chemistry parameters and other established standard methods may be used. Furthermore, computer-aided tomography, X-ray, nuclear magnetic resonance tomography (e.g. for National Cancer Institute-criteria based response assessment [Cheson B D, Horning S J, Coiffier B, Shipp M A, Fisher R I, Connors J M, Lister T A, Vose J, Grillo-Lopez A, Hagenbeek A, Cabanillas F, Klippensten D, Hiddemann W, Castellino R, Harris N L, Armitage J O, Carter W, Hoppe R, Canellos G P. Report of an international workshop to standardize response criteria for non-Hodgkin's lymphomas. NCl Sponsored International Working Group. J Clin Oncol. 1999 April; 17(4):1244]), positron-emission tomography scanning, white blood cell counts, differentials, Fluorescence Activated Cell Sorting, bone marrow aspiration, lymph node biopsies/histologies, and various cancer specific clinical chemistry parameters (e.g. lactate dehydrogenase) and other established standard methods may be used.

[0263] Another major challenge in the development of drugs such as the pharmaceutical composition of the invention is the predictable modulation of pharmacokinetic properties. To this end, a pharmacokinetic profile of the drug candidate, i.e. a profile of the pharmacokinetic parameters that effect the ability of a particular drug to treat a given condition, is established. Pharmacokinetic parameters of the drug influencing the ability of a drug for treating a certain disease entity include, but are not limited to: half-life, volume of distribution, hepatic first-pass metabolism and the degree of blood serum binding. The efficacy of a given drug agent can be influenced by each of the parameters mentioned above.

[0264] “Half-life” means the time where 50% of an administered drug are eliminated through biological processes, e.g. metabolism, excretion, etc.

[0265] By “hepatic first-pass metabolism” is meant the propensity of a drug to be metabolized upon first contact with the liver, i.e. during its first pass through the liver.

[0266] “Volume of distribution” means the degree of retention of a drug throughout the various compartments of the body, like e.g. intracellular and extracellular spaces, tissues and organs, etc. and the distribution of the drug within these compartments.

[0267] “Degree of blood serum binding” means the propensity of a drug to interact with and bind to blood serum proteins, such as albumin, leading to a reduction or loss of biological activity of the drug.

[0268] Pharmacokinetic parameters also include bioavailability, lag time (Tlag), Tmax, absorption rates, more onset and/or Cmaxfor a given amount of drug administered.

[0269] “Bioavailability” means the amount of a drug in the blood compartment.

[0270] “Lag time” means the time delay between the administration of the drug and its detection and measurability in blood or plasma.

[0271] “Tmax” is the time after which maximal blood concentration of the drug is reached, and “Cmax” is the blood concentration maximally obtained with a given drug. The time to reach a blood or tissue concentration of the drug which is required for its biological effect is influenced by all parameters. Pharmacokinetik parameters of bispecific single chain antibodies exhibiting cross-species specificity, which may be determined in preclinical animal testing in non-chimpanzee primates as outlined above are also set forth e.g. in the publication by Schlereth et al. (Cancer Immunol. Immunother. 20 (2005), 1-12).

[0272] The term “toxicity” as used herein refers to the toxic effects of a drug manifested in adverse events or severe adverse events. These side events might refer to a lack of tolerability of the drug in general and/or a lack of local tolerance after administration. Toxicity could also include teratogenic or carcinogenic effects caused by the drug.

[0273] The term “safety”, “in vivo safety” or “tolerability” as used herein defines the administration of a drug without inducing severe adverse events directly after administration (local tolerance) and during a longer period of application of the drug.

[0274] “Safety”, “in vivo safety” or “tolerability” can be evaluated e.g. at regular intervals during the treatment and follow-up period. Measurements include clinical evaluation, e.g. organ manifestations, and screening of laboratory abnormalities. Clinical evaluation may be carried out and deviating to normal findings recorded/coded according to NCl-CTC and/or MedDRA standards. Organ manifestations may include criteria such as allergy/immunology, blood/bone marrow, cardiac arrhythmia, coagulation and the like, as set forth e.g. in the Common Terminology Criteria for adverse events v3.0 (CTCAE). Laboratory parameters which may be tested include for instance haematology, clinical chemistry, coagulation profile and urine analysis and examination of other body fluids such as serum, plasma, lymphoid or spinal fluid, liquor and the like. Safety can thus be assessed e.g. by physical examination, imaging techniques (i.e. ultrasound, x-ray, CT scans, Magnetic Resonance Imaging (MRI), other measures with technical devices (i.e. electrocardiogram), vital signs, by measuring laboratory parameters and recording adverse events. For example, adverse events in non-chimpanzee primates in the uses and methods according to the invention may be examined by histopathological and/or histochemical methods.

[0275] The term “effective and non-toxic dose” as used herein refers to a tolerable dose of the bispecific single chain antibody as defined herein which is high enough to cause depletion of pathologic cells, tumor elimination, tumor shrinkage or stabilization of disease without or essentially without major toxic effects. Such effective and non-toxic doses may be determined e.g. by dose escalation studies described in the art and should be below the dose inducing severe adverse side events (dose limiting toxicity, DLT).

[0276] The above terms are also referred to e.g. in the Preclinical safety evaluation of biotechnology-derived pharmaceuticals S6; ICH Harmonised Tripartite Guideline; ICH Steering Committee meeting on Jul. 16, 1997.

[0277] Moreover, the invention relates to a pharmaceutical composition comprising a bispecific single chain antibody molecule of this invention or produced according to the process according to the invention for the prevention, treatment or amelioration of cancer. Preferably, said cancer is a solid tumor, preferably a carcinoma or prostate cancer. Preferably, said pharmaceutical composition further comprises suitable formulations of carriers, stabilizers and/or excipients.

[0278] A further aspect of the invention relates to a use of a bispecific single chain antibody molecule/polypeptide as defined herein above or produced according to a process defined herein above, for the preparation of a pharmaceutical composition for the prevention, treatment or amelioration of a disease. Preferably, said disease is cancer. More preferably, said cancer is a solid tumor, preferably a carcinoma or prostate cancer.

[0279] In another preferred embodiment of use of the bispecific single chain antibody molecule of the invention said pharmaceutical composition is suitable to be administered in combination with an additional drug, i.e. as part of a co-therapy. In said co-therapy, an active agent may be optionally included in the same pharmaceutical composition as the bispecific single chain antibody molecule of the invention, or may be included in a separate pharmaceutical composition. In this latter case, said separate pharmaceutical composition is suitable for administration prior to, simultaneously as or following administration of said pharmaceutical composition comprising the bispecific single chain antibody molecule of the invention. The additional drug or pharmaceutical composition may be a non-proteinaceous compound or a proteinaceous compound. In the case that the additional drug is a proteinaceous compound, it is advantageous that the proteinaceous compound be capable of providing an activation signal for immune effector cells.

[0280] Preferably, said proteinaceous compound or non-proteinaceous compound may be administered simultaneously or non-simultaneously with the bispecific single chain antibody molecule of the invention, a nucleic acid molecule as defined hereinabove, a vector as defined as defined hereinabove, or a host as defined as defined hereinabove.

[0281] Another aspect of the invention relates to a method for the prevention, treatment or amelioration of a disease in a subject in the need thereof, said method comprising the step of administration of an effective amount of a pharmaceutical composition of the invention. Preferably, said disease is cancer. Preferably, said cancer is a solid tumor, preferably a carcinoma or prostate cancer.

[0282] In another preferred embodiment of the method of the invention said pharmaceutical composition is suitable to be administered in combination with an additional drug, i.e. as part of a co-therapy. In said co-therapy, an active agent may be optionally included in the same pharmaceutical composition as the bispecific single chain antibody molecule of the invention, or may be included in a separate pharmaceutical composition. In this latter case, said separate pharmaceutical composition is suitable for administration prior to, simultaneously as or following administration of said pharmaceutical composition comprising the bispecific single chain antibody molecule of the invention. The additional drug or pharmaceutical composition may be a non-proteinaceous compound or a proteinaceous compound. In the case that the additional drug is a proteinaceous compound, it is advantageous that the proteinaceous compound be capable of providing an activation signal for immune effector cells.

[0283] Preferably, said proteinaceous compound or non-proteinaceous compound may be administered simultaneously or non-simultaneously with the bispecific single chain antibody molecule of the invention, a nucleic acid molecule as defined hereinabove, a vector as defined as defined hereinabove, or a host as defined as defined hereinabove.

[0284] It is preferred for the above described method of the invention that said subject is a human.

[0285] In a further aspect, the invention relates to a kit comprising a bispecific single chain antibody molecule of the invention, a nucleic acid molecule of the invention, a vector of the invention, or a host of the invention.

[0286] These and other embodiments are disclosed and encompassed by the description and Examples of the present invention. Recombinant techniques and methods in immunology are described e.g. in Sambrook et al. Molecular Cloning: A Laboratory Manual; Cold Spring Harbor Laboratory Press, 3^{rd} edition 2001; Lefkovits; Immunology Methods Manual; The Comprehensive Sourcebook of Techniques; Academic Press, 1997; Golemis; Protein-Protein Interactions: A Molecular Cloning Manual; Cold Spring Laboratory Press, 2002. Further literature concerning any one of the antibodies, methods, uses and compounds to be employed in accordance with the present invention may be retrieved from public libraries and databases, using for example electronic devices. For example, the public database “Medline”, available on the Internet, may be utilized, for example under http://www.ncbi.nlm.nih.gov/PubMed/medline.html. Further databases and addresses such as http://www.ncbi.nlm.nih.gov/ or listed at the EMBL-services homepage under http://www.embl.de/services/index.html are known to the person skilled in the art and can also be obtained using, e.g., http://www.google.com.

[0287] The figures show:

[0288] FIG. 1

[0289] FACS binding analysis of the designated cross-species specific bispecific single chain constructs to CHO cells transfected with the human PSMA, human CD3⁺ T cell line HPB-ALL, CHO cells transfected with macaque PSMA and a macaque T cell line 4119 LnPx. The FACS staining is performed as described in Example 2.1. The thick line represents cells incubated with cell culture supernatant that are subsequently incubated with the anti-his antibody and the PE labeled detection antibody. The thin histogram line reflects the negative control: cells only incubated with the anti-his antibody and the detection antibody.

[0290] FIG. 2:

[0291] Cytotoxic activity induced by the designated cross-species specific bispecific single chain constructs redirected to indicated target cell lines. Stimulated CD4⁻/CD56⁻ human T cells are used as effector cells, CHO cells transfected with human PSMA as target cells. The assay is performed as described in Example 2.2.

[0292] The present invention is additionally described by way of the following illustrative non-limiting examples that provide a better understanding of the present invention and of its many advantages.

### EXAMPLES

### 1. Generation and Characterization of PSMA and CD3 Cross-Species Specific Bispecific Single Chain Antibody Molecules

### 1.1 Cloning and Expression of Human PSMA Antigen on CHO Cells

[0293] The sequence of the human PSMA antigen (‘AY101595’, Homo sapiens prostate-specific membrane antigen mRNA, complete cds, National Center for Biotechnology Information, http://www.ncbi.nlm.nih.gov/entrez) was used to obtain a synthetic molecule by gene synthesis according to standard protocols. The gene synthesis fragment was also designed as to contain a Kozak site for eukaryotic expression of the construct and restriction sites at the beginning and the end of the DNA. The introduced restriction sites XbaI at the 5′ end and SalI at the 3′ end were utilised during the cloning step into the expression plasmid designated pEFDHFR as described in Mack et al. (Mack M et al., Proc Natl Acad Sci USA 1995; 92:7021-5. and Raum et al. Cancer Immunol Immunother (2001) 50(3)). After sequence verification the plasmid was used to transfect CHO/dhfr-cells as follows. A sequence verified plasmid was used to transfect CHO/dhfr-cells (ATCC No. CRL 9096; cultivated in RPMI 1640 with stabilized glutamine obtained from Biochrom AG Berlin, Germany, supplemented with 10% FCS, 1% penicillin/streptomycin all obtained from Biochrom AG Berlin, Germany and nucleosides from a stock solution of cell culture grade reagents obtained from Sigma-Aldrich Chemie GmbH, Taufkirchen, Germany, to a final concentration of 10 μg/ml Adenosine, 10 μg/ml Deoxyadenosine and 10 μg/ml Thymidine, in an incubator at 37° C., 95% humidity and 7% CO₂). Transfection was performed using the PolyFect Transfection Reagent (Qiagen GmbH, Hilden, Germany) and 5 μg of plasmid DNA according to the manufacturer's protocol. After a cultivation of 24 hours cells were washed once with PBS and again cultivated in the aforementioned cell culture medium except that the medium was not supplemented with nucleosides and dialysed FCS (obtained from Biochrom AG Berlin, Germany) was used. Thus the cell culture medium did not contain nucleosides and thereby selection was applied on the transfected cells. Approximately 14 days after transfection the outgrowth of resistant cells was observed. After an additional 7 to 14 days the transfectants were tested positive for expression of the construct via FACS. Eukaryotic protein expression in DHFR deficient CHO cells is performed as described by Kaufmann R. J. (1990) Methods Enzymol. 185, 537-566. Gene amplification of the construct is induced by increasing concentrations of methothrexate (MTX) to a final concentration of up to 20 nM MTX

### 1.2 Cloning and Expression of Macaque PSMA Antigen on CHO Cells

[0294] The cDNA sequence of macaque PSMA (cynomolgus) was obtained by a set of five PCRs on cDNA from macaque monkey prostate prepared according to standard protocols. The following reaction conditions: 1 cycle at 94° C. for 2 minutes followed by 40 cycles with 94° C. for 1 minute, 52° C. for 1 minute and 72° C. for 1.5 minutes followed by a terminal cycle of 72° C. for 3 minutes and the following primers were used:

forward primer:

(SEQ ID NO. 213)

5′-cactgtggcccaggttcgagg-3′
reverse primer:

(SEQ ID NO. 214)

5′-gacataccacacaaattcaatacgg-3′
forward primer:

(SEQ ID NO. 215)

5′-gctctgctcgcgccgagatgtgg-3′
reverse primer:

(SEQ ID NO. 216)

5′-acgctggacaccacctccagg-3′
forward primer:

(SEQ ID NO. 217)

5′-ggttctactgagtgggcagagg-3′
reverse primer:

(SEQ ID NO. 218)

5′-acttgttgtggctgcttggagc-3′
forward primer:

(SEQ ID NO. 219)

5′-gggtgaagtcctatccagatgg-3′
reverse primer:

(SEQ ID NO. 220)

5′-gtgctctgcctgaagcaattcc-3′
forward primer:

(SEQ ID NO. 221)

5′-ctcggcttcctcttcgggtgg-3′
reverse primer:

(SEQ ID NO. 222)

5′-gcatattcatttgctgggtaacctgg-3′

[0295] These PCRs generated five overlapping fragments, which were isolated and sequenced according to standard protocols using the PCR primers, and thereby provided a portion of the cDNA sequence coding macaque PSMA from codon 3 to the last codon of the mature protein. To generate a construct for expression of macaque PSMA a cDNA fragment was obtained by gene synthesis according to standard protocols (the cDNA and amino acid sequence of the construct is listed under SEQ ID 223 and 224). In this construct the coding sequence of macaque PSMA from amino acid 3 to the last amino acid of the mature PSMA protein followed by a stop codon was fused in frame to the coding sequence of the first two amino acids of the human PSMA protein. The gene synthesis fragment was also designed as to contain a Kozak site for eukaryotic expression of the construct and restriction sites at the beginning and the end of the fragment containing the cDNA. The introduced restriction sites, XbaI at the 5′ end and SalI at the 3′ end, were utilised in the following cloning procedures. The gene synthesis fragment was cloned via XbaI and SalI into a plasmid designated pEF-DHFR following standard protocols. The aforementioned procedures were carried out according to standard protocols (Sambrook, Molecular Cloning; A Laboratory Manual, 3rd edition, Cold Spring Harbour Laboratory Press, Cold Spring Harbour, New York (2001)). A clone with sequence-verified nucleotide sequence was transfected into DHFR deficient CHO cells for eukaryotic expression of the construct. Eukaryotic protein expression in DHFR deficient CHO cells was performed as described by Kaufmann R. J. (1990) Methods Enzymol. 185, 537-566. Gene amplification of the construct was induced by increasing concentrations of methotrexate (MTX) to a final concentration of up to 20 nM MTX.

### Example 2

### 2.1 Flow Cytometric Binding Analysis of the PSMA and CD3 Cross-Species Specific Bispecific Antibodies

[0296] In order to test the functionality of the cross-species specific bispecific antibody constructs with regard to binding capability to human and macaque PSMA and to human and macaque CD3, a FACS analysis was performed. For this purpose the CHO cells transfected with human PSMA and human CD3 positive T cell leukemia cell line HPB-ALL (DSMZ, Braunschweig, ACC483) were used to check the binding to human antigens. The binding reactivity to macaque antigens was tested by using the generated macaque PSMA transfectant and a macaque T cell line 4119LnPx (kindly provided by Prof Fickenscher, Hygiene Institute, Virology, Erlangen-Nuernberg; published in Knappe A, et al., and Fickenscher H., Blood 2000, 95, 3256-61).

[0297] The flow cytrometric analysis was performed as follows:

200.000 cells of the respective cell lines were incubated for 30 min on ice with 50 μl of the purified protein of the cross-species specific bispecific antibody constructs (2 μg/ml) or cell culture supernatant of transfected cells expressing the cross-species specific bispecific antibody constructs. The cells were washed twice in PBS with 2% FCS and binding of the construct was detected with a murine anti-His antibody (Penta H is antibody; Qiagen; diluted 1:20 in 50 μl PBS with 2% FCS). After washing, bound anti-His antibodies were detected with an Fc gamma-specific antibody (Dianova) conjugated to phycoerythrin, diluted 1:100 in PBS with 2% FCS. Supernatant of untransfected CHO cells was used as negative control for binding to the T cell lines. A single chain construct with irrelevant target specificity was used as negative control for binding to the PSMA transfected CHO cells.

[0298] Flow cytometry was performed on a FACS-Calibur apparatus; the CellQuest software was used to acquire and analyze the data (Becton Dickinson biosciences, Heidelberg). FACS staining and measuring of the fluorescence intensity were performed as described in Current Protocols in Immunology (Coligan, Kruisbeek, Margulies, Shevach and Strober, Wiley-Interscience, 2002).

[0299] The bispecific binding of the single chain molecules, which are cross-species specific for PSMA and cross-species specific for human and macaque CD3 was clearly detectable as shown in FIG. 1. In the FACS analysis all constructs showed binding to CD3 and PSMA as compared to the respective negative controls. Cross-species specificity of the bispecific antibodies to human and macaque CD3 and to human and macaque PSMA antigens was demonstrated.

### 2.2 Bioactivity of PSMA and CD3 Cross-Species Specific Bispecific Single Chain Antibodies

[0300] Bioactivity of the generated bispecific single chain antibodies was analyzed by chromium 51 (⁵¹Cr) release in vitro cytotoxicity assays using human PSMA positive cell line CHO cells. As effector cells stimulated human CD4/CD56 depleted PBMC are used.

[0301] Generation of the stimulated CD4/CD56 depleted PBMC was performed as follows: Coating of a Petri dish (145 mm diameter, Greiner bio-one GmbH, Frickenhausen) was carried out with a commercially available anti-CD3 specific antibody (e.g. OKT3, Othoclone) in a final concentration of 1 μg/ml for 1 hour at 37° C. Unbound protein was removed by one washing step with PBS. The fresh PBMC were isolated from peripheral blood (30-50 ml human blood) by Ficoll gradient centrifugation according to standard protocols. 3-5×10⁷ PBMC were added to the precoated petri dish in 120 ml of RPMI 1640 with stabilized glutamine/10% FCS/IL-2 20 U/ml (Proleukin, Chiron) and stimulated for 2 days. On the third day the cells were collected and washed once with RPMI 1640. IL-2 was added to a final concentration of 20 U/ml and the cells were cultivated again for one day in the same cell culture medium as above. By depletion of CD4+ T cells and CD56+ NK cells according to standard protocols CD8+ cytotoxic T lymphocytes (CTLs) were enriched.

[0302] Target cells were washed twice with PBS and labelled with 11.1 MBq ⁵¹Cr in a final volume of 100 μl RPMI with 50% FCS for 45 minutes at 37° C. Subsequently the labelled target cells were washed 3 times with 5 ml RPMI and then used in the cytotoxicity assay. The assay was performed in a 96 well plate in a total volume of 250 μl supplemented RPMI (as above) with an E:T ratio 10:1. 1 μg/ml of the cross-species specific bispecific single chain antibody molecules and 20 threefold dilutions thereof were applied. The assay time was 18 hours and cytotoxicity was measured as relative values of released chromium in the supernatant related to the difference of maximum lysis (addition of Triton-X) and spontaneous lysis (without effector cells). All measurements were done in quadruplicates. Measurement of chromium activity in the supernatants was performed with a Wizard 3″ gamma counter (Perkin Elmer Life Sciences GmbH, Köln, Germany). Analysis of the experimental data was performed with Prism 5 for Windows (version 5.01, GraphPad Software Inc., San Diego, Calif., USA). Sigmoidal dose response curves typically have R² values >0.90 as determined by the software. EC₅₀ values calculated by the analysis program were used for comparison of bioactivity.

[0303] As shown in FIG. 2, all of the generated cross-species specific bispecific single chain antibody constructs demonstrate cytotoxic activity against human PSMA positive target cells elicited by stimulated human CD4/CD56 depleted PBMC.

### Example 3

### Binding Analysis of scFvs Against Various Cell Lines

[0304] 3.1. Expression of Single Chain Antibody Constructs in E. coli

[0305] The scFv molecules EpCAM 4-7 (WO 99/25818), PM74-G3, PM52-H3, PM52-C3, PM75-A10 and PM91-B6 are expressed by use of the plasmid pComb3H5BFlag/His wherein the expression constructs (e.g. scFv) include the Flag-tag (DYKDDDDK) and the His6-tag. The plasmid DNA of each scFv molecule is transformed into 100 μl heat shock competent E. coli TG1 and plated onto carbenicillin LB-agar. E. coli transformed with pComb3H5BFlag/His containing a VL- and VH-segment produce soluble scFv in sufficient amounts after induction with 1 mM IPTG. Due to a suitable signal sequence, the scFv-chain is exported into the periplasma where it folds into a functional conformation.

[0306] Single E. coli TG1 bacterial colonies from the transformation plates are picked for periplasmic small scale preparations and grown in SB-medium (e.g. 10 ml) supplemented with 20 mM MgCl₂ and carbenicillin 50 μg/ml (and re-dissolved in PBS (e.g. 1 ml) after harvesting. By four rounds of freezing at −70° C. and thawing at 37° C., the outer membrane of the bacteria is destroyed by temperature shock and the soluble periplasmic proteins including the scFvs are released into the supernatant. After elimination of intact cells and cell-debris by centrifugation, the supernatant containing the anti-PSMA scFvs is collected and used for the determination of binding to different cell lines.

### 3.2. Flow Cytometric Binding Analysis of Single Chain Antibody Constructs to Various Cell Lines

[0307] Periplasmic preparations of E. coli clones producing the scFv molecules EpCAM 4-7, PM74-G3, PM52-H3, PM52-C3, PM75-A10 and PM91-B6 are used to examine specific binding to human PSMA or human EpCAM transfected cell lines. As negative control untransfected CHO cell are used.

[0308] For flow cytometry 2,5×10⁵ cells are incubated with 50 μl of scFv periplasmic preparation. The binding of scFv to the cells is detected with an anti-His antibody (Penta-His Antibody, BSA free, Qiagen GmbH, Hilden, FRG) at 2 μg/ml in 50 μl PBS with 2% FCS. As a second step reagent a R-Phycoerythrin-conjugated affinity purified F(ab′)2 fragment, goat anti-mouse IgG (Fc-gamma fragment specific), diluted 1:100 in 50 μl PBS with 2% FCS (Dianova, Hamburg, FRG) is used. The samples are measured on a FACSscan (BD biosciences, Heidelberg, FRG).

[0309] Flow cytometry is performed on a FACS-Calibur apparatus; the CellQuest software is used to acquire and analyze the data (Becton Dickinson biosciences, Heidelberg). FACS staining and measuring of the fluorescence intensity are performed as described in Current Protocols in Immunology (Coligan, Kruisbeek, Margulies, Shevach and Strober, Wiley-Interscience, 2002).

[0310] scFv EpCAM 4-7 showed strong binding to the human EpCAM transfected CHO cell line but no significant binding to human PSMA transfected or untransfected cells. In contrast scFvs PM74-G3, PM52-H3, PM52-C3, PM75-A10 and PM91-B6 showed strong binding to human PSMA transfected CHO cells but not to human EpCAM transfected or untransfected CHO cells.(The binding results of the periplasmatic cell extracts of the respective scFvs on the different transfected cell lines are listed in table 1).

TABLE 1
Results of FACS analysis: ‘+’ indicates binding signal, ‘−’
indicates no significant binding signal

| | | EpCAM | PSMA | |
|---|---|---|---|---|
| SEQ ID | scFv | transfected | transfected | untransfected |
| (nucl/prot) | constructs | CHO cells | CHO cells | CHO cells |
| | EpCAM 4-7 | + | − | − |
| | PM74-G3 | − | + | − |
| | PM52-C3 | − | + | − |
| | PM52-H3 | − | + | − |
| | PM75-A10 | − | + | − |
| | PM91-B6 | − | + | − |

| SEQ ID NO. | DESIGNATION | SOURCE | TYPE | SEQUENCE |
|---|---|---|---|---|
| 1. | Human CD3ε | human | aa | QDGNEEMGGITQTPYKVSISGTTVILTCPQYPGSEILWQHNDKNIGGD |
| | extracellular domain | | | EDDKNIGSDEDHLSLKEFSELEQSGYYVCYPRGSKPEDANFYLYLRAR |
| | | | | VCENCMEMD |
| 2. | Human CD3ε□ 1-27 | human | aa | QDGNEEMGGITQTPYKVSISGTTVILT |
| 3. | Callithrix jacchus CD3ε | Callithrix | aa | QDGNEEMGDTTQNPYKVSISGTTVTLTCPRYDGHEIKWLVNSQNKEGH |
| | extracellular domain | jacchus | | EDHLLLEDFSEMEQSGYYACLSKETPAEEASHYLYLKARVCENCVEVD |
| 4. | Callithrix jacchus CD3ε□ | Callithrix | aa | QDGNEEMGDTTQNPYKVSISGTTVTLT |
| | 1-27 | jacchus | | |
| 5. | Saguinus oedipus CD3ε | Saguinus | aa | QDGNEEMGDTTQNPYKVSISGTTVTLTCPRYDGHEIKWLVNSQNKEGH |
| | extracellular domain | oedipus | | EDHLLLEDFSEMEQSGYYACLSKETPAEEASHYLYLKARVCENCVEVD |
| 6. | Saguinus oedipus CD3ε□ | Saguinus | aa | QDGNEEMGDTTQNPYKVSISGTTVTLT |
| | 1-27 | oedipus | | |
| 7. | Saimiri sciureus CD3ε | Saimiri | aa | QDGNEEIGDTTQNPYKVSISGTTVTLTCPRYDGQEIKWLVNDQNKEGH |
| | extracellular domain | sciureus | | EDHLLLEDFSEMEQSGYYACLSKETPTEEASHYLYLKARVCENCVEVD |
| 8. | Saimiri sciureus CD3ε | Saimiri | aa | QDGNEEIGDTTQNPYKVSISGTTVTLT |
| | 1-27 | sciureus | | |
| 9. | CDR-L1 of F6A | artificial | aa | GSSTGAVTSGYYPN |
| 10. | CDR-L2 of F6A | artificial | aa | GTKFLAP |
| 11. | CDR-L3 of F6A | artificial | aa | ALWYSNRWV |
| 12. | CDR-H1 of F6A | artificial | aa | IYAMN |
| 13. | CDR-H2 of F6A | artificial | aa | RIRSKYNNYATYYADSVKS |
| 14. | CDR-H3 of F6A | artificial | aa | HGNFGNSYVSFFAY |
| 15. | VH of F6A | artificial | aa | EVQLVESGGGLVQPGGSLKLSCAASGFTFNIYAMNWVRQAPGKGLEWV |
| | | | | ARIRSKYNNYATYYADSVKSRFTISRDDSKNTAYLQMNNLKTEDTAVY |
| | | | | YCVRHGNFGNSYVSFFAYWGQGTLVTVSS |
| 16. | VH of F6A | artificial | nt | GAGGTGCAGCTGGTCGAGTCTGGAGGAGGATTGGTGCAGCCTGGAGGG |
| | | | | TCATTGAAACTCTCATGTGCAGCCTCTGGATTCACCTTCAATATCTAC |
| | | | | GCCATGAACTGGGTCCGCCAGGCTCCAGGAAAGGGTTTGGAATGGGTT |
| | | | | GCTCGCATAAGAAGTAAATATAATAATTATGCAACATATTATGCCGAT |
| | | | | TCAGTGAAAAGCAGGTTCACCATCTCCAGAGATGATTCAAAAAACACT |
| | | | | GCCTATCTACAAATGAACAACTTGAAAACTGAGGACACTGCCGTGTAC |
| | | | | TACTGTGTGAGACATGGGAACTTCGGTAATAGCTACGTATCCTTCTTC |
| | | | | GCTTACTGGGGCCAAGGGACTCTGGTCACCGTCTCCTCA |
| 17. | VL of F6A | artificial | aa | QTVVTQEPSLTVSPGGTVTLTCGSSTGAVTSGYYPNWVQQKPGQAPRG |
| | | | | LIGGTKFLAPGTPARFSGSLLGGKAALTLSGVQPEDEAEYYCALWYSN |
| | | | | RWVFGGGTKLTVL |
| 18. | VL of F6A | artificial | nt | CAGACTGTTGTGACTCAGGAACCTTCACTCACCGTATCACCTGGTGGA |
| | | | | ACAGTCACACTCACTTGTGGCTCCTCGACTGGGGCTGTTACATCTGGC |
| | | | | TACTACCCAAACTGGGTCCAACAAAAACCAGGTCAGGCACCCCGTGGT |
| | | | | CTAATAGGTGGGACTAAGTTCCTCGCCCCCGGTACTCCTGCCAGATTC |
| | | | | TCAGGCTCCCTGCTTGGAGGCAAGGCTGCCCTCACCCTCTCAGGGGTA |
| | | | | CAGCCAGAGGATGAGGCAGAATATTACTGTGCTCTATGGTACAGCAAC |
| | | | | CGCTGGGTGTTCGGTGGAGGAACCAAACTGACTGTCCTA |
| 19. | VH-P of F6A | artificial | aa | EVQLLESGGGLVQPGGSLKLSCAASGFTFNIYAMNWVRQAPGKGLEWV |
| | | | | ARIRSKYNNYATYYADSVKSRFTISRDDSKNTAYLQMNNLKTEDTAVY |
| | | | | YCVRHGNFGNSYVSFFAYWGQGTLVTVSS |
| 20. | VH-P of F6A | artificial | nt | GAGGTGCAGCTGCTCGAGTCTGGAGGAGGATTGGTGCAGCCTGGAGGG |
| | | | | TCATTGAAACTCTCATGTGCAGCCTCTGGATTCACCTTCAATATCTAC |
| | | | | GCCATGAACTGGGTCCGCCAGGCTCCAGGAAAGGGTTTGGAATGGGTT |
| | | | | GCTCGCATAAGAAGTAAATATAATAATTATGCAACATATTATGCCGAT |
| | | | | TCAGTGAAAAGCAGGTTCACCATCTCCAGAGATGATTCAAAAAACACT |
| | | | | GCCTATCTACAAATGAACAACTTGAAAACTGAGGACACTGCCGTGTAC |
| | | | | TACTGTGTGAGACATGGGAACTTCGGTAATAGCTACGTATCCTTCTTC |
| | | | | GCTTACTGGGGCCAAGGGACTCTGGTCACCGTCTCCTCA |
| 21. | VL-P of F6A | artificial | aa | ELVVTQEPSLTVSPGGTVTLTCGSSTGAVTSGYYPNWVQQKPGQAPRG |
| | | | | LIGGTKFLAPGTPARFSGSLLGGKAALTLSGVQPEDEAEYYCALWYSN |
| | | | | RWVFGGGTKLTVL |
| 22. | VL-P of F6A | artificial | nt | GAGCTCGTTGTGACTCAGGAACCTTCACTCACCGTATCACCTGGTGGA |
| | | | | ACAGTCACACTCACTTGTGGCTCCTCGACTGGGGCTGTTACATCTGGC |
| | | | | TACTACCCAAACTGGGTCCAACAAAAACCAGGTCAGGCACCCCGTGGT |
| | | | | CTAATAGGTGGGACTAAGTTCCTCGCCCCCGGTACTCCTGCCAGATTC |
| | | | | TCAGGCTCCCTGCTTGGAGGCAAGGCTGCCCTCACCCTCTCAGGGGTA |
| | | | | CAGCCAGAGGATGAGGCAGAATATTACTGTGCTCTATGGTACAGCAAC |
| | | | | CGCTGGGTGTTCGGTGGAGGAACCAAACTGACTGTCCTA |
| 23. | VH-VL of F6A | artificial | aa | EVQLVESGGGLVQPGGSLKLSCAASGFTFNIYAMNWVRQAPGKGLEWV |
| | | | | ARIRSKYNNYATYYADSVKSRFTISRDDSKNTAYLQMNNLKTEDTAVY |
| | | | | YCVRHGNFGNSYVSFFAYWGQGTLVTVSSGGGGSGGGGSGGGGSQTVV |
| | | | | TQEPSLTVSPGGTVTLTCGSSTGAVTSGYYPNWVQQKPGQAPRGLIGG |
| | | | | TKFLAPGTPARFSGSLLGGKAALTLSGVQPEDEAEYYCALWYSNRWVF |
| | | | | GGGTKLTVL |
| 24. | VH-VL of F6A | artificial | nt | GAGGTGCAGCTGGTCGAGTCTGGAGGAGGATTGGTGCAGCCTGGAGGG |
| | | | | TCATTGAAACTCTCATGTGCAGCCTCTGGATTCACCTTCAATATCTAC |
| | | | | GCCATGAACTGGGTCCGCCAGGCTCCAGGAAAGGGTTTGGAATGGGTT |
| | | | | GCTCGCATAAGAAGTAAATATAATAATTATGCAACATATTATGCCGAT |
| | | | | TCAGTGAAAAGCAGGTTCACCATCTCCAGAGATGATTCAAAAAACACT |
| | | | | GCCTATCTACAAATGAACAACTTGAAAACTGAGGACACTGCCGTGTAC |
| | | | | TACTGTGTGAGACATGGGAACTTCGGTAATAGCTACGTATCCTTCTTC |
| | | | | GCTTACTGGGGCCAAGGGACTCTGGTCACCGTCTCCTCAGGTGGTGGT |
| | | | | GGTTCTGGCGGCGGCGGCTCCGGTGGTGGTGGTTCTCAGACTGTTGTG |
| | | | | ACTCAGGAACCTTCACTCACCGTATCACCTGGTGGAACAGTCACACTC |
| | | | | ACTTGTGGCTCCTCGACTGGGGCTGTTACATCTGGCTACTACCCAAAC |
| | | | | TGGGTCCAACAAAAACCAGGTCAGGCACCCCGTGGTCTAATAGGTGGG |
| | | | | ACTAAGTTCCTCGCCCCCGGTACTCCTGCCAGATTCTCAGGCTCCCTG |
| | | | | CTTGGAGGCAAGGCTGCCCTCACCCTCTCAGGGGTACAGCCAGAGGAT |
| | | | | GAGGCAGAATATTACTGTGCTCTATGGTACAGCAACCGCTGGGTGTTC |
| | | | | GGTGGAGGAACCAAACTGACTGTCCTA |
| 25. | VH-VL-P of F6A | artificial | aa | EVQLLESGGGLVQPGGSLKLSCAASGFTFNIYAMNWVRQAPGKGLEWV |
| | | | | ARIRSKYNNYATYYADSVKSRFTISRDDSKNTAYLQMNNLKTEDTAVY |
| | | | | YCVRHGNFGNSYVSFFAYWGQGTLVTVSSGGGGSGGGGSGGGGSELVV |
| | | | | TQEPSLTVSPGGTVTLTCGSSTGAVTSGYYPNWVQQKPGQAPRGLIGG |
| | | | | TKFLAPGTPARFSGSLLGGKAALTLSGVQPEDEAEYYCALWYSNRWVF |
| | | | | GGGTKLTVL |
| 26. | VH-VL-P of F6A | artificial | nt | GAGGTGCAGCTGCTCGAGTCTGGAGGAGGATTGGTGCAGCCTGGAGGG |
| | | | | TCATTGAAACTCTCATGTGCAGCCTCTGGATTCACCTTCAATATCTAC |
| | | | | GCCATGAACTGGGTCCGCCAGGCTCCAGGAAAGGGTTTGGAATGGGTT |
| | | | | GCTCGCATAAGAAGTAAATATAATAATTATGCAACATATTATGCCGAT |
| | | | | TCAGTGAAAAGCAGGTTCACCATCTCCAGAGATGATTCAAAAAACACT |
| | | | | GCCTATCTACAAATGAACAACTTGAAAACTGAGGACACTGCCGTGTAC |
| | | | | TACTGTGTGAGACATGGGAACTTCGGTAATAGCTACGTATCCTTCTTC |
| | | | | GCTTACTGGGGCCAAGGGACTCTGGTCACCGTCTCCTCAGGTGGTGGT |
| | | | | GGTTCTGGCGGCGGCGGCTCCGGTGGTGGTGGTTCTGAGCTCGTTGTG |
| | | | | ACTCAGGAACCTTCACTCACCGTATCACCTGGTGGAACAGTCACACTC |
| | | | | ACTTGTGGCTCCTCGACTGGGGCTGTTACATCTGGCTACTACCCAAAC |
| | | | | TGGGTCCAACAAAAACCAGGTCAGGCACCCCGTGGTCTAATAGGTGGG |
| | | | | ACTAAGTTCCTCGCCCCCGGTACTCCTGCCAGATTCTCAGGCTCCCTG |
| | | | | CTTGGAGGCAAGGCTGCCCTCACCCTCTCAGGGGTACAGCCAGAGGAT |
| | | | | GAGGCAGAATATTACTGTGCTCTATGGTACAGCAACCGCTGGGTGTTC |
| | | | | GGTGGAGGAACCAAACTGACTGTCCTA |
| 27. | CDR-L1 of H2C | artificial | aa | GSSTGAVTSGYYPN |
| 28. | CDR-L2 of H2C | artificial | aa | GTKFLAP |
| 29. | CDR-L3 of H2C | artificial | aa | ALWYSNRWV |
| 30. | CDR-H1 of H2C | artificial | aa | KYAMN |
| 31. | CDR-H2 of H2C | artificial | aa | RIRSKYNNYATYYADSVKD |
| 32. | CDR-H3 of H2C | artificial | aa | HGNFGNSYISYWAY |
| 33. | VH of H2C | artificial | aa | EVQLVESGGGLVQPGGSLKLSCAASGFTFNKYAMNWVRQAPGKGLEWV |
| | | | | ARIRSKYNNYATYYADSVKDRFTISRDDSKNTAYLQMNNLKTEDTAVY |
| | | | | YCVRHGNFGNSYISYWAYWGQGTLVTVSS |
| 34. | VH of H2C | artificial | nt | GAGGTGCAGCTGGTCGAGTCTGGAGGAGGATTGGTGCAGCCTGGAGGG |
| | | | | TCATTGAAACTCTCATGTGCAGCCTCTGGATTCACCTTCAATAAGTAC |
| | | | | GCCATGAACTGGGTCCGCCAGGCTCCAGGAAAGGGTTTGGAATGGGTT |
| | | | | GCTCGCATAAGAAGTAAATATAATAATTATGCAACATATTATGCCGAT |
| | | | | TCAGTGAAAGACAGGTTCACCATCTCCAGAGATGATTCAAAAAACACT |
| | | | | GCCTATCTACAAATGAACAACTTGAAAACTGAGGACACTGCCGTGTAC |
| | | | | TACTGTGTGAGACATGGGAACTTCGGTAATAGCTACATATCCTACTGG |
| | | | | GCTTACTGGGGCCAAGGGACTCTGGTCACCGTCTCCTCA |
| 35. | VL of H2C | artificial | aa | QTVVTQEPSLTVSPGGTVTLTCGSSTGAVTSGYYPNWVQQKPGQAPRG |
| | | | | LIGGTKFLAPGTPARFSGSLLGGKAALTLSGVQPEDEAEYYCALWYSN |
| | | | | RWVFGGGTKLTVL |
| 36. | VL of H2C | artificial | nt | CAGACTGTTGTGACTCAGGAACCTTCACTCACCGTATCACCTGGTGGA |
| | | | | ACAGTCACACTCACTTGTGGCTCCTCGACTGGGGCTGTTACATCTGGC |
| | | | | TACTACCCAAACTGGGTCCAACAAAAACCAGGTCAGGCACCCCGTGGT |
| | | | | CTAATAGGTGGGACTAAGTTCCTCGCCCCCGGTACTCCTGCCAGATTC |
| | | | | TCAGGCTCCCTGCTTGGAGGCAAGGCTGCCCTCACCCTCTCAGGGGTA |
| | | | | CAGCCAGAGGATGAGGCAGAATATTACTGTGCTCTATGGTACAGCAAC |
| | | | | CGCTGGGTGTTCGGTGGAGGAACCAAACTGACTGTCCTA |
| 37. | VH-P of H2C | artificial | aa | EVQLLESGGGLVQPGGSLKLSCAASGFTFNKYAMNWVRQAPGKGLEWV |
| | | | | ARIRSKYNNYATYYADSVKDRFTISRDDSKNTAYLQMNNLKTEDTAVY |
| | | | | YCVRHGNFGNSYISYWAYWGQGTLVTVSS |
| 38. | VH-P of H2C | artificial | nt | GAGGTGCAGCTGCTCGAGTCTGGAGGAGGATTGGTGCAGCCTGGAGGG |
| | | | | TCATTGAAACTCTCATGTGCAGCCTCTGGATTCACCTTCAATAAGTAC |
| | | | | GCCATGAACTGGGTCCGCCAGGCTCCAGGAAAGGGTTTGGAATGGGTT |
| | | | | GCTCGCATAAGAAGTAAATATAATAATTATGCAACATATTATGCCGAT |
| | | | | TCAGTGAAAGACAGGTTCACCATCTCCAGAGATGATTCAAAAAACACT |
| | | | | GCCTATCTACAAATGAACAACTTGAAAACTGAGGACACTGCCGTGTAC |
| | | | | TACTGTGTGAGACATGGGAACTTCGGTAATAGCTACATATCCTACTGG |
| | | | | GCTTACTGGGGCCAAGGGACTCTGGTCACCGTCTCCTCA |
| 39. | VL-P of H2C | artificial | aa | ELVVTQEPSLTVSPGGTVTLTCGSSTGAVTSGYYPNWVQQKPGQAPRG |
| | | | | LIGGTKFLAPGTPARFSGSLLGGKAALTLSGVQPEDEAEYYCALWYSN |
| | | | | RWVFGGGTKLTVL |
| 40. | VL-P of H2C | artificial | nt | GAGCTCGTTGTGACTCAGGAACCTTCACTCACCGTATCACCTGGTGGA |
| | | | | ACAGTCACACTCACTTGTGGCTCCTCGACTGGGGCTGTTACATCTGGC |
| | | | | TACTACCCAAACTGGGTCCAACAAAAACCAGGTCAGGCACCCCGTGGT |
| | | | | CTAATAGGTGGGACTAAGTTCCTCGCCCCCGGTACTCCTGCCAGATTC |
| | | | | TCAGGCTCCCTGCTTGGAGGCAAGGCTGCCCTCACCCTCTCAGGGGTA |
| | | | | CAGCCAGAGGATGAGGCAGAATATTACTGTGCTCTATGGTACAGCAAC |
| | | | | CGCTGGGTGTTCGGTGGAGGAACCAAACTGACTGTCCTA |
| 41. | VH-VL of H2C | artificial | aa | EVQLVESGGGLVQPGGSLKLSCAASGFTFNKYAMNWVRQAPGKGLEWV |
| | | | | ARIRSKYNNYATYYADSVKDRFTISRDDSKNTAYLQMNNLKTEDTAVY |
| | | | | YCVRHGNFGNSYISYWAYWGQGTLVTVSSGGGGSGGGGSGGGGSQTVV |
| | | | | TQEPSLTVSPGGTVTLTCGSSTGAVTSGYYPNWVQQKPGQAPRGLIGG |
| | | | | TKFLAPGTPARFSGSLLGGKAALTLSGVQPEDEAEYYCALWYSNRWVF |
| | | | | GGGTKLTVL |
| 42. | VH-VL of H2C | artificial | nt | GAGGTGCAGCTGGTCGAGTCTGGAGGAGGATTGGTGCAGCCTGGAGGG |
| | | | | TCATTGAAACTCTCATGTGCAGCCTCTGGATTCACCTTCAATAAGTAC |
| | | | | GCCATGAACTGGGTCCGCCAGGCTCCAGGAAAGGGTTTGGAATGGGTT |
| | | | | GCTCGCATAAGAAGTAAATATAATAATTATGCAACATATTATGCCGAT |
| | | | | TCAGTGAAAGACAGGTTCACCATCTCCAGAGATGATTCAAAAAACACT |
| | | | | GCCTATCTACAAATGAACAACTTGAAAACTGAGGACACTGCCGTGTAC |
| | | | | TACTGTGTGAGACATGGGAACTTCGGTAATAGCTACATATCCTACTGG |
| | | | | GCTTACTGGGGCCAAGGGACTCTGGTCACCGTCTCCTCAGGTGGTGGT |
| | | | | GGTTCTGGCGGCGGCGGCTCCGGTGGTGGTGGTTCTCAGACTGTTGTG |
| | | | | ACTCAGGAACCTTCACTCACCGTATCACCTGGTGGAACAGTCACACTC |
| | | | | ACTTGTGGCTCCTCGACTGGGGCTGTTACATCTGGCTACTACCCAAAC |
| | | | | TGGGTCCAACAAAAACCAGGTCAGGCACCCCGTGGTCTAATAGGTGGG |
| | | | | ACTAAGTTCCTCGCCCCCGGTACTCCTGCCAGATTCTCAGGCTCCCTG |
| | | | | CTTGGAGGCAAGGCTGCCCTCACCCTCTCAGGGGTACAGCCAGAGGAT |
| | | | | GAGGCAGAATATTACTGTGCTCTATGGTACAGCAACCGCTGGGTGTTC |
| | | | | GGTGGAGGAACCAAACTGACTGTCCTA |
| 43. | VH-VL-P of H2C | artificial | aa | EVQLLESGGGLVQPGGSLKLSCAASGFTFNKYAMNWVRQAPGKGLEWV |
| | | | | ARIRSKYNNYATYYADSVKDRFTISRDDSKNTAYLQMNNLKTEDTAVY |
| | | | | YCVRHGNFGNSYISYWAYWGQGTLVTVSSGGGGSGGGGSGGGGSELVV |
| | | | | TQEPSLTVSPGGTVTLTCGSSTGAVTSGYYPNWVQQKPGQAPRGLIGG |
| | | | | TKFLAPGTPARFSGSLLGGKAALTLSGVQPEDEAEYYCALWYSNRWVF |
| | | | | GGGTKLTVL |
| 44. | VH-VL-P of H2C | artificial | nt | GAGGTGCAGCTGCTCGAGTCTGGAGGAGGATTGGTGCAGCCTGGAGGG |
| | | | | TCATTGAAACTCTCATGTGCAGCCTCTGGATTCACCTTCAATAAGTAC |
| | | | | GCCATGAACTGGGTCCGCCAGGCTCCAGGAAAGGGTTTGGAATGGGTT |
| | | | | GCTCGCATAAGAAGTAAATATAATAATTATGCAACATATTATGCCGAT |
| | | | | TCAGTGAAAGACAGGTTCACCATCTCCAGAGATGATTCAAAAAACACT |
| | | | | GCCTATCTACAAATGAACAACTTGAAAACTGAGGACACTGCCGTGTAC |
| | | | | TACTGTGTGAGACATGGGAACTTCGGTAATAGCTACATATCCTACTGG |
| | | | | GCTTACTGGGGCCAAGGGACTCTGGTCACCGTCTCCTCAGGTGGTGGT |
| | | | | GGTTCTGGCGGCGGCGGCTCCGGTGGTGGTGGTTCTGAGCTCGTTGTG |
| | | | | ACTCAGGAACCTTCACTCACCGTATCACCTGGTGGAACAGTCACACTC |
| | | | | ACTTGTGGCTCCTCGACTGGGGCTGTTACATCTGGCTACTACCCAAAC |
| | | | | TGGGTCCAACAAAAACCAGGTCAGGCACCCCGTGGTCTAATAGGTGGG |
| | | | | ACTAAGTTCCTCGCCCCCGGTACTCCTGCCAGATTCTCAGGCTCCCTG |
| | | | | CTTGGAGGCAAGGCTGCCCTCACCCTCTCAGGGGTACAGCCAGAGGAT |
| | | | | GAGGCAGAATATTACTGTGCTCTATGGTACAGCAACCGCTGGGTGTTC |
| | | | | GGTGGAGGAACCAAACTGACTGTCCTA |
| 45. | CDR-L1 of H1E | artificial | aa | GSSTGAVTSGYYPN |
| 46. | CDR-L2 of H1E | artificial | aa | GTKFLAP |
| 47. | CDR-L3 of H1E | artificial | aa | ALWYSNRWV |
| 48. | CDR-H1 of H1E | artificial | aa | SYAMN |
| 49. | CDR-H2 of H1E | artificial | aa | RIRSKYNNYATYYADSVKG |
| 50. | CDR-H3 of H1E | artificial | aa | HGNFGNSYLSFWAY |
| 51. | VH of H1E | artificial | aa | EVQLVESGGGLEQPGGSLKLSCAASGFTFNSYAMNWVRQAPGKGLEWV |
| | | | | ARIRSKYNNYATYYADSVKGRFTISRDDSKNTAYLQMNNLKTEDTAVY |
| | | | | YCVRHGNFGNSYLSFWAYWGQGTLVTVSS |
| 52. | VH of H1E | artificial | nt | GAGGTGCAGCTGGTCGAGTCTGGAGGAGGATTGGAGCAGCCTGGAGGG |
| | | | | TCATTGAAACTCTCATGTGCAGCCTCTGGATTCACCTTCAATTCGTAC |
| | | | | GCCATGAACTGGGTCCGCCAGGCTCCAGGAAAGGGTTTGGAATGGGTT |
| | | | | GCTCGCATAAGAAGTAAATATAATAATTATGCAACATATTATGCCGAT |
| | | | | TCAGTGAAAGGGAGGTTCACCATCTCCAGAGATGATTCAAAAAACACT |
| | | | | GCCTATCTACAAATGAACAACTTGAAAACTGAGGACACTGCCGTGTAC |
| | | | | TACTGTGTGAGACATGGGAACTTCGGTAATAGCTACCTATCCTTCTGG |
| | | | | GCTTACTGGGGCCAAGGGACTCTGGTCACCGTCTCCTC |
| 53. | VL of H1E | artificial | aa | QTVVTQEPSLTVSPGGTVTLTCGSSTGAVTSGYYPNWVQQKPGQAPRG |
| | | | | LIGGTKFLAPGTPARFSGSLLGGKAALTLSGVQPEDEAEYYCALWYSN |
| | | | | RWVFGGGTKLTVL |
| 54. | VL of H1E | artificial | nt | CAGACTGTTGTGACTCAGGAACCTTCACTCACCGTATCACCTGGTGGA |
| | | | | ACAGTCACACTCACTTGTGGCTCCTCGACTGGGGCTGTTACATCTGGC |
| | | | | TACTACCCAAACTGGGTCCAACAAAAACCAGGTCAGGCACCCCGTGGT |
| | | | | CTAATAGGTGGGACTAAGTTCCTCGCCCCCGGTACTCCTGCCAGATTC |
| | | | | TCAGGCTCCCTGCTTGGAGGCAAGGCTGCCCTCACCCTCTCAGGGGTA |
| | | | | CAGCCAGAGGATGAGGCAGAATATTACTGTGCTCTATGGTACAGCAAC |
| | | | | CGCTGGGTGTTCGGTGGAGGAACCAAACTGACTGTCCTA |
| 55. | VH-P of H1E | artificial | aa | EVQLLESGGGLEQPGGSLKLSCAASGFTFNSYAMNWVRQAPGKGLEWV |
| | | | | ARIRSKYNNYATYYADSVKGRFTISRDDSKNTAYLQMNNLKTEDTAVY |
| | | | | YCVRHGNFGNSYLSFWAYWGQGTLVTVSS |
| 56. | VH-P of H1E | artificial | nt | GAGGTGCAGCTGCTCGAGTCTGGAGGAGGATTGGAGCAGCCTGGAGGG |
| | | | | TCATTGAAACTCTCATGTGCAGCCTCTGGATTCACCTTCAATTCGTAC |
| | | | | GCCATGAACTGGGTCCGCCAGGCTCCAGGAAAGGGTTTGGAATGGGTT |
| | | | | GCTCGCATAAGAAGTAAATATAATAATTATGCAACATATTATGCCGAT |
| | | | | TCAGTGAAAGGGAGGTTCACCATCTCCAGAGATGATTCAAAAAACACT |
| | | | | GCCTATCTACAAATGAACAACTTGAAAACTGAGGACACTGCCGTGTAC |
| | | | | TACTGTGTGAGACATGGGAACTTCGGTAATAGCTACCTATCCTTCTGG |
| | | | | GCTTACTGGGGCCAAGGGACTCTGGTCACCGTCTCCTCA |
| 57. | VL-P of H1E | artificial | aa | ELVVTQEPSLTVSPGGTVTLTCGSSTGAVTSGYYPNWVQQKPGQAPRG |
| | | | | LIGGTKFLAPGTPARFSGSLLGGKAALTLSGVQPEDEAEYYCALWYSN |
| | | | | RWVFGGGTKLTVL |
| 58. | VL-P of H1E | artificial | nt | GAGCTCGTTGTGACTCAGGAACCTTCACTCACCGTATCACCTGGTGGA |
| | | | | ACAGTCACACTCACTTGTGGCTCCTCGACTGGGGCTGTTACATCTGGC |
| | | | | TACTACCCAAACTGGGTCCAACAAAAACCAGGTCAGGCACCCCGTGGT |
| | | | | CTAATAGGTGGGACTAAGTTCCTCGCCCCCGGTACTCCTGCCAGATTC |
| | | | | TCAGGCTCCCTGCTTGGAGGCAAGGCTGCCCTCACCCTCTCAGGGGTA |
| | | | | CAGCCAGAGGATGAGGCAGAATATTACTGTGCTCTATGGTACAGCAAC |
| | | | | CGCTGGGTGTTCGGTGGAGGAACCAAACTGACTGTCCTA |
| 59. | VH-VL of H1E | artificial | aa | EVQLVESGGGLEQPGGSLKLSCAASGFTFNSYAMNWVRQAPGKGLEWV |
| | | | | ARIRSKYNNYATYYADSVKGRFTISRDDSKNTAYLQMNNLKTEDTAVY |
| | | | | YCVRHGNFGNSYLSFWAYWGQGTLVTVSSGGGGSGGGGSGGGGSQTVV |
| | | | | TQEPSLTVSPGGTVTLTCGSSTGAVTSGYYPNWVQQKPGQAPRGLIGG |
| | | | | TKFLAPGTPARFSGSLLGGKAALTLSGVQPEDEAEYYCALWYSNRWVF |
| | | | | GGGTKLTVL |
| 60. | VH-VL of H1E | artificial | nt | GAGGTGCAGCTGGTCGAGTCTGGAGGAGGATTGGAGCAGCCTGGAGGG |
| | | | | TCATTGAAACTCTCATGTGCAGCCTCTGGATTCACCTTCAATTCGTAC |
| | | | | GCCATGAACTGGGTCCGCCAGGCTCCAGGAAAGGGTTTGGAATGGGTT |
| | | | | GCTCGCATAAGAAGTAAATATAATAATTATGCAACATATTATGCCGAT |
| | | | | TCAGTGAAAGGGAGGTTCACCATCTCCAGAGATGATTCAAAAAACACT |
| | | | | GCCTATCTACAAATGAACAACTTGAAAACTGAGGACACTGCCGTGTAC |
| | | | | TACTGTGTGAGACATGGGAACTTCGGTAATAGCTACCTATCCTTCTGG |
| | | | | GCTTACTGGGGCCAAGGGACTCTGGTCACCGTCTCCTCAGGTGGTGGT |
| | | | | GGTTCTGGCGGCGGCGGCTCCGGTGGTGGTGGTTCTCAGACTGTTGTG |
| | | | | ACTCAGGAACCTTCACTCACCGTATCACCTGGTGGAACAGTCACACTC |
| | | | | ACTTGTGGCTCCTCGACTGGGGCTGTTACATCTGGCTACTACCCAAAC |
| | | | | TGGGTCCAACAAAAACCAGGTCAGGCACCCCGTGGTCTAATAGGTGGG |
| | | | | ACTAAGTTCCTCGCCCCCGGTACTCCTGCCAGATTCTCAGGCTCCCTG |
| | | | | CTTGGAGGCAAGGCTGCCCTCACCCTCTCAGGGGTACAGCCAGAGGAT |
| | | | | GAGGCAGAATATTACTGTGCTCTATGGTACAGCAACCGCTGGGTGTTC |
| | | | | GGTGGAGGAACCAAACTGACTGTCCTA |
| 61. | VH-VL-P of H1E | artificial | aa | EVQLLESGGGLEQPGGSLKLSCAASGFTFNSYAMNWVRQAPGKGLEWV |
| | | | | ARIRSKYNNYATYYADSVKGRFTISRDDSKNTAYLQMNNLKTEDTAVY |
| | | | | YCVRHGNFGNSYLSFWAYWGQGTLVTVSSGGGGSGGGGSGGGGSELVV |
| | | | | TQEPSLTVSPGGTVTLTCGSSTGAVTSGYYPNWVQQKPGQAPRGLIGG |
| | | | | TKFLAPGTPARFSGSLLGGKAALTLSGVQPEDEAEYYCALWYSNRWVF |
| | | | | GGGTKLTVL |
| 62. | VH-VL-P of H1E | artificial | nt | GAGGTGCAGCTGCTCGAGTCTGGAGGAGGATTGGAGCAGCCTGGAGGG |
| | | | | TCATTGAAACTCTCATGTGCAGCCTCTGGATTCACCTTCAATTCGTAC |
| | | | | GCCATGAACTGGGTCCGCCAGGCTCCAGGAAAGGGTTTGGAATGGGTT |
| | | | | GCTCGCATAAGAAGTAAATATAATAATTATGCAACATATTATGCCGAT |
| | | | | TCAGTGAAAGGGAGGTTCACCATCTCCAGAGATGATTCAAAAAACACT |
| | | | | GCCTATCTACAAATGAACAACTTGAAAACTGAGGACACTGCCGTGTAC |
| | | | | TACTGTGTGAGACATGGGAACTTCGGTAATAGCTACCTATCCTTCTGG |
| | | | | GCTTACTGGGGCCAAGGGACTCTGGTCACCGTCTCCTCAGGTGGTGGT |
| | | | | GGTTCTGGCGGCGGCGGCTCCGGTGGTGGTGGTTCTGAGCTCGTTGTG |
| | | | | ACTCAGGAACCTTCACTCACCGTATCACCTGGTGGAACAGTCACACTC |
| | | | | ACTTGTGGCTCCTCGACTGGGGCTGTTACATCTGGCTACTACCCAAAC |
| | | | | TGGGTCCAACAAAAACCAGGTCAGGCACCCCGTGGTCTAATAGGTGGG |
| | | | | ACTAAGTTCCTCGCCCCCGGTACTCCTGCCAGATTCTCAGGCTCCCTG |
| | | | | CTTGGAGGCAAGGCTGCCCTCACCCTCTCAGGGGTACAGCCAGAGGAT |
| | | | | GAGGCAGAATATTACTGTGCTCTATGGTACAGCAACCGCTGGGTGTTC |
| | | | | GGTGGAGGAACCAAACTGACTGTCCTA |
| 63. | CDR-L1 of G4H | artificial | aa | GSSTGAVTSGYYPN |
| 64. | CDR-L2 of G4H | artificial | aa | GTKFLAP |
| 65. | CDR-L3 of G4H | artificial | aa | ALWYSNRWV |
| 66. | CDR-H1 of G4H | artificial | aa | RYAMN |
| 67. | CDR-H2 of G4H | artificial | aa | RIRSKYNNYATYYADSVKG |
| 68. | CDR-H3 of G4H | artificial | aa | HGNFGNSYLSYFAY |
| 69. | VH of G4H | artificial | aa | EVQLVESGGGLVQPGGSLKLSCAASGFTFNRYAMNWVRQAPGKGLEWV |
| | | | | ARIRSKYNNYATYYADSVKGRFTISRDDSKNTAYLQMNNLKTEDTAVY |
| | | | | YCVRHGNFGNSYLSYFAYWGQGTLVTVSS |
| 70. | VH of G4H | artificial | nt | GAGGTGCAGCTGGTCGAGTCTGGAGGAGGATTGGTGCAGCCTGGAGGG |
| | | | | TCATTGAAACTCTCATGTGCAGCCTCTGGATTCACCTTCAATCGCTAC |
| | | | | GCCATGAACTGGGTCCGCCAGGCTCCAGGAAAGGGTTTGGAATGGGTT |
| | | | | GCTCGCATAAGAAGTAAATATAATAATTATGCAACATATTATGCCGAT |
| | | | | TCAGTGAAAGGGAGGTTCACCATCTCCAGAGATGATTCAAAAAACACT |
| | | | | GCCTATCTACAAATGAACAACTTGAAAACTGAGGACACTGCCGTGTAC |
| | | | | TACTGTGTGAGACATGGGAACTTCGGTAATAGCTACTTATCCTACTTC |
| | | | | GCTTACTGGGGCCAAGGGACTCTGGTCACCGTCTCCTCA |
| 71. | VL of G4H | artificial | aa | QTVVTQEPSLTVSPGGTVTLTCGSSTGAVTSGYYPNWVQQKPGQAPRG |
| | | | | LIGGTKFLAPGTPARFSGSLLGGKAALTLSGVQPEDEAEYYCALWYSN |
| | | | | RWVFGGGTKLTVL |
| 72. | VL of G4H | artificial | nt | CAGACTGTTGTGACTCAGGAACCTTCACTCACCGTATCACCTGGTGGA |
| | | | | ACAGTCACACTCACTTGTGGCTCCTCGACTGGGGCTGTTACATCTGGC |
| | | | | TACTACCCAAACTGGGTCCAACAAAAACCAGGTCAGGCACCCCGTGGT |
| | | | | CTAATAGGTGGGACTAAGTTCCTCGCCCCCGGTACTCCTGCCAGATTC |
| | | | | TCAGGCTCCCTGCTTGGAGGCAAGGCTGCCCTCACCCTCTCAGGGGTA |
| | | | | CAGCCAGAGGATGAGGCAGAATATTACTGTGCTCTATGGTACAGCAAC |
| | | | | CGCTGGGTGTTCGGTGGAGGAACCAAACTGACTGTCCTA |
| 73. | VH-P of G4H | artificial | aa | EVQLLESGGGLVQPGGSLKLSCAASGFTFNRYAMNWVRQAPGKGLEWV |
| | | | | ARIRSKYNNYATYYADSVKGRFTISRDDSKNTAYLQMNNLKTEDTAVY |
| | | | | YCVRHGNFGNSYLSYFAYWGQGTLVTVSS |
| 74. | VH-P of G4H | artificial | nt | GAGGTGCAGCTGCTCGAGTCTGGAGGAGGATTGGTGCAGCCTGGAGGG |
| | | | | TCATTGAAACTCTCATGTGCAGCCTCTGGATTCACCTTCAATCGCTAC |
| | | | | GCCATGAACTGGGTCCGCCAGGCTCCAGGAAAGGGTTTGGAATGGGTT |
| | | | | GCTCGCATAAGAAGTAAATATAATAATTATGCAACATATTATGCCGAT |
| | | | | TCAGTGAAAGGGAGGTTCACCATCTCCAGAGATGATTCAAAAAACACT |
| | | | | GCCTATCTACAAATGAACAACTTGAAAACTGAGGACACTGCCGTGTAC |
| | | | | TACTGTGTGAGACATGGGAACTTCGGTAATAGCTACTTATCCTACTTC |
| | | | | GCTTACTGGGGCCAAGGGACTCTGGTCACCGTCTCCTCA |
| 75. | VL-P of G4H | artificial | aa | ELVVTQEPSLTVSPGGTVTLTCGSSTGAVTSGYYPNWVQQKPGQAPRG |
| | | | | LIGGTKFLAPGTPARFSGSLLGGKAALTLSGVQPEDEAEYYCALWYSN |
| | | | | RWVFGGGTKLTVL |
| 76. | VL-P of G4H | artificial | nt | GAGCTCGTTGTGACTCAGGAACCTTCACTCACCGTATCACCTGGTGGA |
| | | | | ACAGTCACACTCACTTGTGGCTCCTCGACTGGGGCTGTTACATCTGGC |
| | | | | TACTACCCAAACTGGGTCCAACAAAAACCAGGTCAGGCACCCCGTGGT |
| | | | | CTAATAGGTGGGACTAAGTTCCTCGCCCCCGGTACTCCTGCCAGATTC |
| | | | | TCAGGCTCCCTGCTTGGAGGCAAGGCTGCCCTCACCCTCTCAGGGGTA |
| | | | | CAGCCAGAGGATGAGGCAGAATATTACTGTGCTCTATGGTACAGCAAC |
| | | | | CGCTGGGTGTTCGGTGGAGGAACCAAACTGACTGTCCTA |
| 77. | VH-VL of G4H | artificial | aa | EVQLVESGGGLVQPGGSLKLSCAASGFTFNRYAMNWVRQAPGKGLEWV |
| | | | | ARIRSKYNNYATYYADSVKGRFTISRDDSKNTAYLQMNNLKTEDTAVY |
| | | | | YCVRHGNFGNSYLSYFAYWGQGTLVTVSSGGGGSGGGGSGGGGSQTVV |
| | | | | TQEPSLTVSPGGTVTLTCGSSTGAVTSGYYPNWVQQKPGQAPRGLIGG |
| | | | | TKFLAPGTPARFSGSLLGGKAALTLSGVQPEDEAEYYCALWYSNRWVF |
| | | | | GGGTKLTVL |
| 78. | VH-VL of G4H | artificial | nt | GAGGTGCAGCTGGTCGAGTCTGGAGGAGGATTGGTGCAGCCTGGAGGG |
| | | | | TCATTGAAACTCTCATGTGCAGCCTCTGGATTCACCTTCAATCGCTAC |
| | | | | GCCATGAACTGGGTCCGCCAGGCTCCAGGAAAGGGTTTGGAATGGGTT |
| | | | | GCTCGCATAAGAAGTAAATATAATAATTATGCAACATATTATGCCGAT |
| | | | | TCAGTGAAAGGGAGGTTCACCATCTCCAGAGATGATTCAAAAAACACT |
| | | | | GCCTATCTACAAATGAACAACTTGAAAACTGAGGACACTGCCGTGTAC |
| | | | | TACTGTGTGAGACATGGGAACTTCGGTAATAGCTACTTATCCTACTTC |
| | | | | GCTTACTGGGGCCAAGGGACTCTGGTCACCGTCTCCTCAGGTGGTGGT |
| | | | | GGTTCTGGCGGCGGCGGCTCCGGTGGTGGTGGTTCTCAGACTGTTGTG |
| | | | | ACTCAGGAACCTTCACTCACCGTATCACCTGGTGGAACAGTCACACTC |
| | | | | ACTTGTGGCTCCTCGACTGGGGCTGTTACATCTGGCTACTACCCAAAC |
| | | | | TGGGTCCAACAAAAACCAGGTCAGGCACCCCGTGGTCTAATAGGTGGG |
| | | | | ACTAAGTTCCTCGCCCCCGGTACTCCTGCCAGATTCTCAGGCTCCCTG |
| | | | | CTTGGAGGCAAGGCTGCCCTCACCCTCTCAGGGGTACAGCCAGAGGAT |
| | | | | GAGGCAGAATATTACTGTGCTCTATGGTACAGCAACCGCTGGGTGTTC |
| | | | | GGTGGAGGAACCAAACTGACTGTCCTA |
| 79. | VH-VL-P of G4H | artificial | aa | EVQLLESGGGLVQPGGSLKLSCAASGFTFNRYAMNWVRQAPGKGLEWV |
| | | | | ARIRSKYNNYATYYADSVKGRFTISRDDSKNTAYLQMNNLKTEDTAVY |
| | | | | YCVRHGNFGNSYLSYFAYWGQGTLVTVSSGGGGSGGGGSGGGGSELVV |
| | | | | TQEPSLTVSPGGTVTLTCGSSTGAVTSGYYPNWVQQKPGQAPRGLIGG |
| | | | | TKFLAPGTPARFSGSLLGGKAALTLSGVQPEDEAEYYCALWYSNRWVF |
| | | | | GGGTKLTVL |
| 80. | VH-VL-P of G4H | artificial | nt | GAGGTGCAGCTGCTCGAGTCTGGAGGAGGATTGGTGCAGCCTGGAGGG |
| | | | | TCATTGAAACTCTCATGTGCAGCCTCTGGATTCACCTTCAATCGCTAC |
| | | | | GCCATGAACTGGGTCCGCCAGGCTCCAGGAAAGGGTTTGGAATGGGTT |
| | | | | GCTCGCATAAGAAGTAAATATAATAATTATGCAACATATTATGCCGAT |
| | | | | TCAGTGAAAGGGAGGTTCACCATCTCCAGAGATGATTCAAAAAACACT |
| | | | | GCCTATCTACAAATGAACAACTTGAAAACTGAGGACACTGCCGTGTAC |
| | | | | TACTGTGTGAGACATGGGAACTTCGGTAATAGCTACTTATCCTACTTC |
| | | | | GCTTACTGGGGCCAAGGGACTCTGGTCACCGTCTCCTCAGGTGGTGGT |
| | | | | GGTTCTGGCGGCGGCGGCTCCGGTGGTGGTGGTTCTGAGCTCGTTGTG |
| | | | | ACTCAGGAACCTTCACTCACCGTATCACCTGGTGGAACAGTCACACTC |
| | | | | ACTTGTGGCTCCTCGACTGGGGCTGTTACATCTGGCTACTACCCAAAC |
| | | | | TGGGTCCAACAAAAACCAGGTCAGGCACCCCGTGGTCTAATAGGTGGG |
| | | | | ACTAAGTTCCTCGCCCCCGGTACTCCTGCCAGATTCTCAGGCTCCCTG |
| | | | | CTTGGAGGCAAGGCTGCCCTCACCCTCTCAGGGGTACAGCCAGAGGAT |
| | | | | GAGGCAGAATATTACTGTGCTCTATGGTACAGCAACCGCTGGGTGTTC |
| | | | | GGTGGAGGAACCAAACTGACTGTCCTA |
| 81. | CDR-L1 of A2J | artificial | aa | RSSTGAVTSGYYPN |
| 82. | CDR-L2 of A2J | artificial | aa | ATDMRPS |
| 83. | CDR-L3 of A2J | artificial | aa | ALWYSNRWV |
| 84. | CDR-H1 of A2J | artificial | aa | VYAMN |
| 85. | CDR-H2 of A2J | artificial | aa | RIRSKYNNYATYYADSVKK |
| 86. | CDR-H3 of A2J | artificial | aa | HGNFGNSYLSWWAY |
| 87. | VH of A2J | artificial | aa | EVQLVESGGGLVQPGGSLKLSCAASGFTFNVYAMNWVRQAPGKGLEWV |
| | | | | ARIRSKYNNYATYYADSVKKRFTISRDDSKNTAYLQMNNLKTEDTAVY |
| | | | | YCVRHGNFGNSYLSWWAYWGQGTLVTVSS |
| 88. | VH of A2J | artificial | nt | GAGGTGCAGCTGGTCGAGTCTGGAGGAGGATTGGTGCAGCCTGGAGGG |
| | | | | TCATTGAAACTCTCATGTGCAGCCTCTGGATTCACCTTCAATGTCTAC |
| | | | | GCCATGAACTGGGTCCGCCAGGCTCCAGGAAAGGGTTTGGAATGGGTT |
| | | | | GCTCGCATAAGAAGTAAATATAATAATTATGCAACATATTATGCCGAT |
| | | | | TCAGTGAAAAAGAGGTTCACCATCTCCAGAGATGATTCAAAAAACACT |
| | | | | GCCTATCTACAAATGAACAACTTGAAAACTGAGGACACTGCCGTGTAC |
| | | | | TACTGTGTGAGACATGGGAACTTCGGTAATAGCTACTTATCCTGGTGG |
| | | | | GCTTACTGGGGCCAAGGGACTCTGGTCACCGTCTCCTCA |
| 89. | VL of A2J | artificial | aa | QTVVTQEPSLTVSPGGTVTLTCRSSTGAVTSGYYPNWVQQKPGQAPRG |
| | | | | LIGATDMRPSGTPARFSGSLLGGKAALTLSGVQPEDEAEYYCALWYSN |
| | | | | RWVFGGGTKLTVL |
| 90. | VL of A2J | artificial | nt | CAGACTGTTGTGACTCAGGAACCTTCACTCACCGTATCACCTGGTGGA |
| | | | | ACAGTCACACTCACTTGTCGCTCCTCGACTGGGGCTGTTACATCTGGC |
| | | | | TACTACCCAAACTGGGTCCAACAAAAACCAGGTCAGGCACCCCGTGGT |
| | | | | CTAATAGGTGCCACTGACATGAGGCCCTCTGGTACTCCTGCCAGATTC |
| | | | | TCAGGCTCCCTGCTTGGAGGCAAGGCTGCCCTCACCCTCTCAGGGGTA |
| | | | | CAGCCAGAGGATGAGGCAGAATATTACTGTGCTCTATGGTACAGCAAC |
| | | | | CGCTGGGTGTTCGGTGGAGGAACCAAACTGACTGTCCTA |
| 91. | VH-P of A2J | artificial | aa | EVQLLESGGGLVQPGGSLKLSCAASGFTFNVYAMNWVRQAPGKGLEWV |
| | | | | ARIRSKYNNYATYYADSVKKRFTISRDDSKNTAYLQMNNLKTEDTAVY |
| | | | | YCVRHGNFGNSYLSWWAYWGQGTLVTVSS |
| 92. | VH-P of A2J | artificial | nt | GAGGTGCAGCTGCTCGAGTCTGGAGGAGGATTGGTGCAGCCTGGAGGG |
| | | | | TCATTGAAACTCTCATGTGCAGCCTCTGGATTCACCTTCAATGTCTAC |
| | | | | GCCATGAACTGGGTCCGCCAGGCTCCAGGAAAGGGTTTGGAATGGGTT |
| | | | | GCTCGCATAAGAAGTAAATATAATAATTATGCAACATATTATGCCGAT |
| | | | | TCAGTGAAAAAGAGGTTCACCATCTCCAGAGATGATTCAAAAAACACT |
| | | | | GCCTATCTACAAATGAACAACTTGAAAACTGAGGACACTGCCGTGTAC |
| | | | | TACTGTGTGAGACATGGGAACTTCGGTAATAGCTACTTATCCTGGTGG |
| | | | | GCTTACTGGGGCCAAGGGACTCTGGTCACCGTCTCCTCA |
| 93. | VL-P of A2J | artificial | aa | ELVVTQEPSLTVSPGGTVTLTCRSSTGAVTSGYYPNWVQQKPGQAPRG |
| | | | | LIGATDMRPSGTPARFSGSLLGGKAALTLSGVQPEDEAEYYCALWYSN |
| | | | | RWVFGGGTKLTVL |
| 94. | VL-P of A2J | artificial | nt | GAGCTCGTTGTGACTCAGGAACCTTCACTCACCGTATCACCTGGTGGA |
| | | | | ACAGTCACACTCACTTGTCGCTCCTCGACTGGGGCTGTTACATCTGGC |
| | | | | TACTACCCAAACTGGGTCCAACAAAAACCAGGTCAGGCACCCCGTGGT |
| | | | | CTAATAGGTGCCACTGACATGAGGCCCTCTGGTACTCCTGCCAGATTC |
| | | | | TCAGGCTCCCTGCTTGGAGGCAAGGCTGCCCTCACCCTCTCAGGGGTA |
| | | | | CAGCCAGAGGATGAGGCAGAATATTACTGTGCTCTATGGTACAGCAAC |
| | | | | CGCTGGGTGTTCGGTGGAGGAACCAAACTGACTGTCCTA |
| 95. | VH-VL of A2J | artificial | aa | EVQLVESGGGLVQPGGSLKLSCAASGFTFNVYAMNWVRQAPGKGLEWV |
| | | | | ARIRSKYNNYATYYADSVKKRFTISRDDSKNTAYLQMNNLKTEDTAVY |
| | | | | YCVRHGNFGNSYLSWWAYWGQGTLVTVSSGGGGSGGGGSGGGGSQTVV |
| | | | | TQEPSLTVSPGGTVTLTCRSSTGAVTSGYYPNWVQQKPGQAPRGLIGA |
| | | | | TDMRPSGTPARFSGSLLGGKAALTLSGVQPEDEAEYYCALWYSNRWVF |
| | | | | GGGTKLTVL |
| 96. | VH-VL of A2J | artificial | nt | GAGGTGCAGCTGGTCGAGTCTGGAGGAGGATTGGTGCAGCCTGGAGGG |
| | | | | TCATTGAAACTCTCATGTGCAGCCTCTGGATTCACCTTCAATGTCTAC |
| | | | | GCCATGAACTGGGTCCGCCAGGCTCCAGGAAAGGGTTTGGAATGGGTT |
| | | | | GCTCGCATAAGAAGTAAATATAATAATTATGCAACATATTATGCCGAT |
| | | | | TCAGTGAAAAAGAGGTTCACCATCTCCAGAGATGATTCAAAAAACACT |
| | | | | GCCTATCTACAAATGAACAACTTGAAAACTGAGGACACTGCCGTGTAC |
| | | | | TACTGTGTGAGACATGGGAACTTCGGTAATAGCTACTTATCCTGGTGG |
| | | | | GCTTACTGGGGCCAAGGGACTCTGGTCACCGTCTCCTCAGGTGGTGGT |
| | | | | GGTTCTGGCGGCGGCGGCTCCGGTGGTGGTGGTTCTCAGACTGTTGTG |
| | | | | ACTCAGGAACCTTCACTCACCGTATCACCTGGTGGAACAGTCACACTC |
| | | | | ACTTGTCGCTCCTCGACTGGGGCTGTTACATCTGGCTACTACCCAAAC |
| | | | | TGGGTCCAACAAAAACCAGGTCAGGCACCCCGTGGTCTAATAGGTGCC |
| | | | | ACTGACATGAGGCCCTCTGGTACTCCTGCCAGATTCTCAGGCTCCCTG |
| | | | | CTTGGAGGCAAGGCTGCCCTCACCCTCTCAGGGGTACAGCCAGAGGAT |
| | | | | GAGGCAGAATATTACTGTGCTCTATGGTACAGCAACCGCTGGGTGTTC |
| | | | | GGTGGAGGAACCAAACTGACTGTCCTA |
| 97. | VH-VL-P of A2J | artificial | aa | EVQLLESGGGLVQPGGSLKLSCAASGFTFNVYAMNWVRQAPGKGLEWV |
| | | | | ARIRSKYNNYATYYADSVKKRFTISRDDSKNTAYLQMNNLKTEDTAVY |
| | | | | YCVRHGNFGNSYLSWWAYWGQGTLVTVSSGGGGSGGGGSGGGGSELVV |
| | | | | TQEPSLTVSPGGTVTLTCRSSTGAVTSGYYPNWVQQKPGQAPRGLIGA |
| | | | | TDMRPSGTPARFSGSLLGGKAALTLSGVQPEDEAEYYCALWYSNRWVF |
| | | | | GGGTKLTVL |
| 98. | VH-VL-P of A2J | artificial | nt | GAGGTGCAGCTGCTCGAGTCTGGAGGAGGATTGGTGCAGCCTGGAGGG |
| | | | | TCATTGAAACTCTCATGTGCAGCCTCTGGATTCACCTTCAATGTCTAC |
| | | | | GCCATGAACTGGGTCCGCCAGGCTCCAGGAAAGGGTTTGGAATGGGTT |
| | | | | GCTCGCATAAGAAGTAAATATAATAATTATGCAACATATTATGCCGAT |
| | | | | TCAGTGAAAAAGAGGTTCACCATCTCCAGAGATGATTCAAAAAACACT |
| | | | | GCCTATCTACAAATGAACAACTTGAAAACTGAGGACACTGCCGTGTAC |
| | | | | TACTGTGTGAGACATGGGAACTTCGGTAATAGCTACTTATCCTGGTGG |
| | | | | GCTTACTGGGGCCAAGGGACTCTGGTCACCGTCTCCTCAGGTGGTGGT |
| | | | | GGTTCTGGCGGCGGCGGCTCCGGTGGTGGTGGTTCTGAGCTCGTTGTG |
| | | | | ACTCAGGAACCTTCACTCACCGTATCACCTGGTGGAACAGTCACACTC |
| | | | | ACTTGTCGCTCCTCGACTGGGGCTGTTACATCTGGCTACTACCCAAAC |
| | | | | TGGGTCCAACAAAAACCAGGTCAGGCACCCCGTGGTCTAATAGGTGCC |
| | | | | ACTGACATGAGGCCCTCTGGTACTCCTGCCAGATTCTCAGGCTCCCTG |
| | | | | CTTGGAGGCAAGGCTGCCCTCACCCTCTCAGGGGTACAGCCAGAGGAT |
| | | | | GAGGCAGAATATTACTGTGCTCTATGGTACAGCAACCGCTGGGTGTTC |
| | | | | GGTGGAGGAACCAAACTGACTGTCCTA |
| 99. | CDR-L1 of E1L | artificial | aa | GSSTGAVTSGYYPN |
| 100. | CDR-L2 of E1L | artificial | aa | GTKFLAP |
| 101. | CDR-L3 of E1L | artificial | aa | ALWYSNRWV |
| 102. | CDR-H1 of E1L | artificial | aa | KYAMN |
| 103. | CDR-H2 of E1L | artificial | aa | RIRSKYNNYATYYADSVKS |
| 104. | CDR-H3 of E1L | artificial | aa | HGNFGNSYTSYYAY |
| 105. | VH of E1L | artificial | aa | EVQLVESGGGLVQPGGSLKLSCAASGFTFNKYAMNWVRQAPGKGLEWV |
| | | | | ARIRSKYNNYATYYADSVKSRFTISRDDSKNTAYLQMNNLKTEDTAVY |
| | | | | YCVRHGNFGNSYTSYYAYWGQGTLVTVSS |
| 106. | VH of E1L | artificial | nt | GAGGTGCAGCTGGTCGAGTCTGGAGGAGGATTGGTGCAGCCTGGAGGG |
| | | | | TCATTGAAACTCTCATGTGCAGCCTCTGGATTCACCTTCAATAAGTAC |
| | | | | GCCATGAACTGGGTCCGCCAGGCTCCAGGAAAGGGTTTGGAATGGGTT |
| | | | | GCTCGCATAAGAAGTAAATATAATAATTATGCAACATATTATGCCGAT |
| | | | | TCAGTGAAATCGAGGTTCACCATCTCCAGAGATGATTCAAAAAACACT |
| | | | | GCCTATCTACAAATGAACAACTTGAAAACTGAGGACACTGCCGTGTAC |
| | | | | TACTGTGTGAGACATGGGAACTTCGGTAATAGCTACACATCCTACTAC |
| | | | | GCTTACTGGGGCCAAGGGACTCTGGTCACCGTCTCCTCA |
| 107. | VL of E1L | artificial | aa | QTVVTQEPSLTVSPGGTVTLTCGSSTGAVTSGYYPNWVQQKPGQAPRG |
| | | | | LIGGTKFLAPGTPARFSGSLLGGKAALTLSGVQPEDEAEYYCALWYSN |
| | | | | RWVFGGGTKLTVL |
| 108. | VL of E1L | artificial | nt | CAGACTGTTGTGACTCAGGAACCTTCACTCACCGTATCACCTGGTGGA |
| | | | | ACAGTCACACTCACTTGTGGCTCCTCGACTGGGGCTGTTACATCTGGC |
| | | | | TACTACCCAAACTGGGTCCAACAAAAACCAGGTCAGGCACCCCGTGGT |
| | | | | CTAATAGGTGGGACTAAGTTCCTCGCCCCCGGTACTCCTGCCAGATTC |
| | | | | TCAGGCTCCCTGCTTGGAGGCAAGGCTGCCCTCACCCTCTCAGGGGTA |
| | | | | CAGCCAGAGGATGAGGCAGAATATTACTGTGCTCTATGGTACAGCAAC |
| | | | | CGCTGGGTGTTCGGTGGAGGAACCAAACTGACTGTCCTA |
| 109. | VH-P of E1L | artificial | aa | EVQLLESGGGLVQPGGSLKLSCAASGFTFNKYAMNWVRQAPGKGLEWV |
| | | | | ARIRSKYNNYATYYADSVKSRFTISRDDSKNTAYLQMNNLKTEDTAVY |
| | | | | YCVRHGNFGNSYTSYYAYWGQGTLVTVSS |
| 110. | VH-P of E1L | artificial | nt | GAGGTGCAGCTGCTCGAGTCTGGAGGAGGATTGGTGCAGCCTGGAGGG |
| | | | | TCATTGAAACTCTCATGTGCAGCCTCTGGATTCACCTTCAATAAGTAC |
| | | | | GCCATGAACTGGGTCCGCCAGGCTCCAGGAAAGGGTTTGGAATGGGTT |
| | | | | GCTCGCATAAGAAGTAAATATAATAATTATGCAACATATTATGCCGAT |
| | | | | TCAGTGAAATCGAGGTTCACCATCTCCAGAGATGATTCAAAAAACACT |
| | | | | GCCTATCTACAAATGAACAACTTGAAAACTGAGGACACTGCCGTGTAC |
| | | | | TACTGTGTGAGACATGGGAACTTCGGTAATAGCTACACATCCTACTAC |
| | | | | GCTTACTGGGGCCAAGGGACTCTGGTCACCGTCTCCTCA |
| 111. | VL-P of E1L | artificial | aa | ELVVTQEPSLTVSPGGTVTLTCGSSTGAVTSGYYPNWVQQKPGQAPRG |
| | | | | LIGGTKFLAPGTPARFSGSLLGGKAALTLSGVQPEDEAEYYCALWYSN |
| | | | | RWVFGGGTKLTVL |
| 112. | VL-P of E1L | artificial | nt | GAGCTCGTTGTGACTCAGGAACCTTCACTCACCGTATCACCTGGTGGA |
| | | | | ACAGTCACACTCACTTGTGGCTCCTCGACTGGGGCTGTTACATCTGGC |
| | | | | TACTACCCAAACTGGGTCCAACAAAAACCAGGTCAGGCACCCCGTGGT |
| | | | | CTAATAGGTGGGACTAAGTTCCTCGCCCCCGGTACTCCTGCCAGATTC |
| | | | | TCAGGCTCCCTGCTTGGAGGCAAGGCTGCCCTCACCCTCTCAGGGGTA |
| | | | | CAGCCAGAGGATGAGGCAGAATATTACTGTGCTCTATGGTACAGCAAC |
| | | | | CGCTGGGTGTTCGGTGGAGGAACCAAACTGACTGTCCTA |
| 113. | VH-VL of E1L | artificial | aa | EVQLVESGGGLVQPGGSLKLSCAASGFTFNKYAMNWVRQAPGKGLEWV |
| | | | | ARIRSKYNNYATYYADSVKSRFTISRDDSKNTAYLQMNNLKTEDTAVY |
| | | | | YCVRHGNFGNSYTSYYAYWGQGTLVTVSSGGGGSGGGGSGGGGSQTVV |
| | | | | TQEPSLTVSPGGTVTLTCGSSTGAVTSGYYPNWVQQKPGQAPRGLIGG |
| | | | | TKFLAPGTPARFSGSLLGGKAALTLSGVQPEDEAEYYCALWYSNRWVF |
| | | | | GGGTKLTVL |
| 114. | VH-VL of E1L | artificial | nt | GAGGTGCAGCTGGTCGAGTCTGGAGGAGGATTGGTGCAGCCTGGAGGG |
| | | | | TCATTGAAACTCTCATGTGCAGCCTCTGGATTCACCTTCAATAAGTAC |
| | | | | GCCATGAACTGGGTCCGCCAGGCTCCAGGAAAGGGTTTGGAATGGGTT |
| | | | | GCTCGCATAAGAAGTAAATATAATAATTATGCAACATATTATGCCGAT |
| | | | | TCAGTGAAATCGAGGTTCACCATCTCCAGAGATGATTCAAAAAACACT |
| | | | | GCCTATCTACAAATGAACAACTTGAAAACTGAGGACACTGCCGTGTAC |
| | | | | TACTGTGTGAGACATGGGAACTTCGGTAATAGCTACACATCCTACTAC |
| | | | | GCTTACTGGGGCCAAGGGACTCTGGTCACCGTCTCCTCAGGTGGTGGT |
| | | | | GGTTCTGGCGGCGGCGGCTCCGGTGGTGGTGGTTCTCAGACTGTTGTG |
| | | | | ACTCAGGAACCTTCACTCACCGTATCACCTGGTGGAACAGTCACACTC |
| | | | | ACTTGTGGCTCCTCGACTGGGGCTGTTACATCTGGCTACTACCCAAAC |
| | | | | TGGGTCCAACAAAAACCAGGTCAGGCACCCCGTGGTCTAATAGGTGGG |
| | | | | ACTAAGTTCCTCGCCCCCGGTACTCCTGCCAGATTCTCAGGCTCCCTG |
| | | | | CTTGGAGGCAAGGCTGCCCTCACCCTCTCAGGGGTACAGCCAGAGGAT |
| | | | | GAGGCAGAATATTACTGTGCTCTATGGTACAGCAACCGCTGGGTGTTC |
| | | | | GGTGGAGGAACCAAACTGACTGTCCTA |
| 115. | VH-VL-P of E1L | artificial | aa | EVQLLESGGGLVQPGGSLKLSCAASGFTFNKYAMNWVRQAPGKGLEWV |
| | | | | ARIRSKYNNYATYYADSVKSRFTISRDDSKNTAYLQMNNLKTEDTAVY |
| | | | | YCVRHGNFGNSYTSYYAYWGQGTLVTVSSGGGGSGGGGSGGGGSELVV |
| | | | | TQEPSLTVSPGGTVTLTCGSSTGAVTSGYYPNWVQQKPGQAPRGLIGG |
| | | | | TKFLAPGTPARFSGSLLGGKAALTLSGVQPEDEAEYYCALWYSNRWVF |
| | | | | GGGTKLTVL |
| 116. | VH-VL-P of E1L | artificial | nt | GAGGTGCAGCTGCTCGAGTCTGGAGGAGGATTGGTGCAGCCTGGAGGG |
| | | | | TCATTGAAACTCTCATGTGCAGCCTCTGGATTCACCTTCAATAAGTAC |
| | | | | GCCATGAACTGGGTCCGCCAGGCTCCAGGAAAGGGTTTGGAATGGGTT |
| | | | | GCTCGCATAAGAAGTAAATATAATAATTATGCAACATATTATGCCGAT |
| | | | | TCAGTGAAATCGAGGTTCACCATCTCCAGAGATGATTCAAAAAACACT |
| | | | | GCCTATCTACAAATGAACAACTTGAAAACTGAGGACACTGCCGTGTAC |
| | | | | TACTGTGTGAGACATGGGAACTTCGGTAATAGCTACACATCCTACTAC |
| | | | | GCTTACTGGGGCCAAGGGACTCTGGTCACCGTCTCCTCAGGTGGTGGT |
| | | | | GGTTCTGGCGGCGGCGGCTCCGGTGGTGGTGGTTCTGAGCTCGTTGTG |
| | | | | ACTCAGGAACCTTCACTCACCGTATCACCTGGTGGAACAGTCACACTC |
| | | | | ACTTGTGGCTCCTCGACTGGGGCTGTTACATCTGGCTACTACCCAAAC |
| | | | | TGGGTCCAACAAAAACCAGGTCAGGCACCCCGTGGTCTAATAGGTGGG |
| | | | | ACTAAGTTCCTCGCCCCCGGTACTCCTGCCAGATTCTCAGGCTCCCTG |
| | | | | CTTGGAGGCAAGGCTGCCCTCACCCTCTCAGGGGTACAGCCAGAGGAT |
| | | | | GAGGCAGAATATTACTGTGCTCTATGGTACAGCAACCGCTGGGTGTTC |
| | | | | GGTGGAGGAACCAAACTGACTGTCCTA |
| 117. | CDR-L1 of E2M | artificial | aa | RSSTGAVTSGYYPN |
| 118. | CDR-L2 of E2M | artificial | aa | ATDMRPS |
| 119. | CDR-L3 of E2M | artificial | aa | ALWYSNRWV |
| 120. | CDR-H1 of E2M | artificial | aa | GYAMN |
| 121. | CDR-H2 of E2M | artificial | aa | RIRSKYNNYATYYADSVKE |
| 122. | CDR-H3 of E2M | artificial | aa | HRNFGNSYLSWFAY |
| 123. | VH of E2M | artificial | aa | EVQLVESGGGLVQPGGSLKLSCAASGFTFNGYAMNWVRQAPGKGLEWV |
| | | | | ARIRSKYNNYATYYADSVKERFTISRDDSKNTAYLQMNNLKTEDTAVY |
| | | | | YCVRHRNFGNSYLSWFAYWGQGTLVTVSS |
| 124. | VH of E2M | artificial | nt | GAGGTGCAGCTGGTCGAGTCTGGAGGAGGATTGGTGCAGCCTGGAGGG |
| | | | | TCATTGAAACTCTCATGTGCAGCCTCTGGATTCACCTTCAATGGCTAC |
| | | | | GCCATGAACTGGGTCCGCCAGGCTCCAGGAAAGGGTTTGGAATGGGTT |
| | | | | GCTCGCATAAGAAGTAAATATAATAATTATGCAACATATTATGCCGAT |
| | | | | TCAGTGAAAGAGAGGTTCACCATCTCCAGAGATGATTCAAAAAACACT |
| | | | | GCCTATCTACAAATGAACAACTTGAAAACTGAGGACACTGCCGTGTAC |
| | | | | TACTGTGTGAGACATAGGAACTTCGGTAATAGCTACTTATCCTGGTTC |
| | | | | GCTTACTGGGGCCAAGGGACTCTGGTCACCGTCTCCTCA |
| 125. | VL of E2M | artificial | aa | QTVVTQEPSLTVSPGGTVTLTCRSSTGAVTSGYYPNWVQQKPGQAPRG |
| | | | | LIGATDMRPSGTPARFSGSLLGGKAALTLSGVQPEDEAEYYCALWYSN |
| | | | | RWVFGGGTKLTVL |
| 126. | VL of E2M | artificial | nt | CAGACTGTTGTGACTCAGGAACCTTCACTCACCGTATCACCTGGTGGA |
| | | | | ACAGTCACACTCACTTGTCGCTCCTCGACTGGGGCTGTTACATCTGGC |
| | | | | TACTACCCAAACTGGGTCCAACAAAAACCAGGTCAGGCACCCCGTGGT |
| | | | | CTAATAGGTGCCACTGACATGAGGCCCTCTGGTACTCCTGCCAGATTC |
| | | | | TCAGGCTCCCTGCTTGGAGGCAAGGCTGCCCTCACCCTCTCAGGGGTA |
| | | | | CAGCCAGAGGATGAGGCAGAATATTACTGTGCTCTATGGTACAGCAAC |
| | | | | CGCTGGGTGTTCGGTGGAGGAACCAAACTGACTGTCCTA |
| 127. | VH-P of E2M | artificial | aa | EVQLLESGGGLVQPGGSLKLSCAASGFTFNGYAMNWVRQAPGKGLEWV |
| | | | | ARIRSKYNNYATYYADSVKERFTISRDDSKNTAYLQMNNLKTEDTAVY |
| | | | | YCVRHRNFGNSYLSWFAYWGQGTLVTVSS |
| 128. | VH-P of E2M | artificial | nt | GAGGTGCAGCTGCTCGAGTCTGGAGGAGGATTGGTGCAGCCTGGAGGG |
| | | | | TCATTGAAACTCTCATGTGCAGCCTCTGGATTCACCTTCAATGGCTAC |
| | | | | GCCATGAACTGGGTCCGCCAGGCTCCAGGAAAGGGTTTGGAATGGGTT |
| | | | | GCTCGCATAAGAAGTAAATATAATAATTATGCAACATATTATGCCGAT |
| | | | | TCAGTGAAAGAGAGGTTCACCATCTCCAGAGATGATTCAAAAAACACT |
| | | | | GCCTATCTACAAATGAACAACTTGAAAACTGAGGACACTGCCGTGTAC |
| | | | | TACTGTGTGAGACATAGGAACTTCGGTAATAGCTACTTATCCTGGTTC |
| | | | | GCTTACTGGGGCCAAGGGACTCTGGTCACCGTCTCCTCA |
| 129. | VL-P of E2M | artificial | aa | ELVVTQEPSLTVSPGGTVTLTCRSSTGAVTSGYYPNWVQQKPGQAPRG |
| | | | | LIGATDMRPSGTPARFSGSLLGGKAALTLSGVQPEDEAEYYCALWYSN |
| | | | | RWVFGGGTKLTVL |
| 130. | VL-P of E2M | artificial | nt | GAGCTCGTTGTGACTCAGGAACCTTCACTCACCGTATCACCTGGTGGA |
| | | | | ACAGTCACACTCACTTGTCGCTCCTCGACTGGGGCTGTTACATCTGGC |
| | | | | TACTACCCAAACTGGGTCCAACAAAAACCAGGTCAGGCACCCCGTGGT |
| | | | | CTAATAGGTGCCACTGACATGAGGCCCTCTGGTACTCCTGCCAGATTC |
| | | | | TCAGGCTCCCTGCTTGGAGGCAAGGCTGCCCTCACCCTCTCAGGGGTA |
| | | | | CAGCCAGAGGATGAGGCAGAATATTACTGTGCTCTATGGTACAGCAAC |
| | | | | CGCTGGGTGTTCGGTGGAGGAACCAAACTGACTGTCCTA |
| 131. | VH-VL of E2M | artificial | aa | EVQLVESGGGLVQPGGSLKLSCAASGFTFNGYAMNWVRQAPGKGLEWV |
| | | | | ARIRSKYNNYATYYADSVKERFTISRDDSKNTAYLQMNNLKTEDTAVY |
| | | | | YCVRHRNFGNSYLSWFAYWGQGTLVTVSSGGGGSGGGGSGGGGSQTVV |
| | | | | TQEPSLTVSPGGTVTLTCRSSTGAVTSGYYPNWVQQKPGQAPRGLIGA |
| | | | | TDMRPSGTPARFSGSLLGGKAALTLSGVQPEDEAEYYCALWYSNRWVF |
| | | | | GGGTKLTVL |
| 132. | VH-VL of E2M | artificial | nt | GAGGTGCAGCTGGTCGAGTCTGGAGGAGGATTGGTGCAGCCTGGAGGG |
| | | | | TCATTGAAACTCTCATGTGCAGCCTCTGGATTCACCTTCAATGGCTAC |
| | | | | GCCATGAACTGGGTCCGCCAGGCTCCAGGAAAGGGTTTGGAATGGGTT |
| | | | | GCTCGCATAAGAAGTAAATATAATAATTATGCAACATATTATGCCGAT |
| | | | | TCAGTGAAAGAGAGGTTCACCATCTCCAGAGATGATTCAAAAAACACT |
| | | | | GCCTATCTACAAATGAACAACTTGAAAACTGAGGACACTGCCGTGTAC |
| | | | | TACTGTGTGAGACATAGGAACTTCGGTAATAGCTACTTATCCTGGTTC |
| | | | | GCTTACTGGGGCCAAGGGACTCTGGTCACCGTCTCCTCAGGTGGTGGT |
| | | | | GGTTCTGGCGGCGGCGGCTCCGGTGGTGGTGGTTCTCAGACTGTTGTG |
| | | | | ACTCAGGAACCTTCACTCACCGTATCACCTGGTGGAACAGTCACACTC |
| | | | | ACTTGTCGCTCCTCGACTGGGGCTGTTACATCTGGCTACTACCCAAAC |
| | | | | TGGGTCCAACAAAAACCAGGTCAGGCACCCCGTGGTCTAATAGGTGCC |
| | | | | ACTGACATGAGGCCCTCTGGTACTCCTGCCAGATTCTCAGGCTCCCTG |
| | | | | CTTGGAGGCAAGGCTGCCCTCACCCTCTCAGGGGTACAGCCAGAGGAT |
| | | | | GAGGCAGAATATTACTGTGCTCTATGGTACAGCAACCGCTGGGTGTTC |
| | | | | GGTGGAGGAACCAAACTGACTGTCCTA |
| 133. | VH-VL-P of E2M | artificial | aa | EVQLLESGGGLVQPGGSLKLSCAASGFTFNGYAMNWVRQAPGKGLEWV |
| | | | | ARIRSKYNNYATYYADSVKERFTISRDDSKNTAYLQMNNLKTEDTAVY |
| | | | | YCVRHRNFGNSYLSWFAYWGQGTLVTVSSGGGGSGGGGSGGGGSELVV |
| | | | | TQEPSLTVSPGGTVTLTCRSSTGAVTSGYYPNWVQQKPGQAPRGLIGA |
| | | | | TDMRPSGTPARFSGSLLGGKAALTLSGVQPEDEAEYYCALWYSNRWVF |
| | | | | GGGTKLTVL |
| 134. | VH-VL-P of E2M | artificial | nt | GAGGTGCAGCTGCTCGAGTCTGGAGGAGGATTGGTGCAGCCTGGAGGG |
| | | | | TCATTGAAACTCTCATGTGCAGCCTCTGGATTCACCTTCAATGGCTAC |
| | | | | GCCATGAACTGGGTCCGCCAGGCTCCAGGAAAGGGTTTGGAATGGGTT |
| | | | | GCTCGCATAAGAAGTAAATATAATAATTATGCAACATATTATGCCGAT |
| | | | | TCAGTGAAAGAGAGGTTCACCATCTCCAGAGATGATTCAAAAAACACT |
| | | | | GCCTATCTACAAATGAACAACTTGAAAACTGAGGACACTGCCGTGTAC |
| | | | | TACTGTGTGAGACATAGGAACTTCGGTAATAGCTACTTATCCTGGTTC |
| | | | | GCTTACTGGGGCCAAGGGACTCTGGTCACCGTCTCCTCAGGTGGTGGT |
| | | | | GGTTCTGGCGGCGGCGGCTCCGGTGGTGGTGGTTCTGAGCTCGTTGTG |
| | | | | ACTCAGGAACCTTCACTCACCGTATCACCTGGTGGAACAGTCACACTC |
| | | | | ACTTGTCGCTCCTCGACTGGGGCTGTTACATCTGGCTACTACCCAAAC |
| | | | | TGGGTCCAACAAAAACCAGGTCAGGCACCCCGTGGTCTAATAGGTGCC |
| | | | | ACTGACATGAGGCCCTCTGGTACTCCTGCCAGATTCTCAGGCTCCCTG |
| | | | | CTTGGAGGCAAGGCTGCCCTCACCCTCTCAGGGGTACAGCCAGAGGAT |
| | | | | GAGGCAGAATATTACTGTGCTCTATGGTACAGCAACCGCTGGGTGTTC |
| | | | | GGTGGAGGAACCAAACTGACTGTCCTA |
| 135. | CDR-L1 of F7O | artificial | aa | GSSTGAVTSGYYPN |
| 136. | CDR-L2 of F7O | artificial | aa | GTKFLAP |
| 137. | CDR-L3 of F7O | artificial | aa | ALWYSNRWV |
| 138. | CDR-H1 of F7O | artificial | aa | VYAMN |
| 139. | CDR-H2 of F7O | artificial | aa | RIRSKYNNYATYYADSVKK |
| 140. | CDR-H3 of F7O | artificial | aa | HGNFGNSYISWWAY |
| 141. | VH of F7O | artificial | aa | EVQLVESGGGLVQPGGSLKLSCAASGFTFNVYAMNWVRQAPGKGLEWV |
| | | | | ARIRSKYNNYATYYADSVKKRFTISRDDSKNTAYLQMNNLKTEDTAVY |
| | | | | YCVRHGNFGNSYISWWAYWGQGTLVTVSS |
| 142. | VH of F7O | artificial | nt | GAGGTGCAGCTGGTCGAGTCTGGAGGAGGATTGGTGCAGCCTGGAGGG |
| | | | | TCATTGAAACTCTCATGTGCAGCCTCTGGATTCACCTTCAATGTGTAC |
| | | | | GCCATGAACTGGGTCCGCCAGGCTCCAGGAAAGGGTTTGGAATGGGTT |
| | | | | GCTCGCATAAGAAGTAAATATAATAATTATGCAACATATTATGCCGAT |
| | | | | TCAGTGAAAAAGAGGTTCACCATCTCCAGAGATGATTCAAAAAACACT |
| | | | | GCCTATCTACAAATGAACAACTTGAAAACTGAGGACACTGCCGTGTAC |
| | | | | TACTGTGTGAGACATGGGAACTTCGGTAATAGCTACATATCCTGGTGG |
| | | | | GCTTACTGGGGCCAAGGGACTCTGGTCACCGTCTCCTCA |
| 143. | VL of F7O | artificial | aa | QTVVTQEPSLTVSPGGTVTLTCGSSTGAVTSGYYPNWVQQKPGQAPRG |
| | | | | LIGGTKFLAPGTPARFSGSLLGGKAALTLSGVQPEDEAEYYCALWYSN |
| | | | | RWVFGGGTKLTVL |
| 144. | VL of F7O | artificial | nt | CAGACTGTTGTGACTCAGGAACCTTCACTCACCGTATCACCTGGTGGA |
| | | | | ACAGTCACACTCACTTGTGGCTCCTCGACTGGGGCTGTTACATCTGGC |
| | | | | TACTACCCAAACTGGGTCCAACAAAAACCAGGTCAGGCACCCCGTGGT |
| | | | | CTAATAGGTGGGACTAAGTTCCTCGCCCCCGGTACTCCTGCCAGATTC |
| | | | | TCAGGCTCCCTGCTTGGAGGCAAGGCTGCCCTCACCCTCTCAGGGGTA |
| | | | | CAGCCAGAGGATGAGGCAGAATATTACTGTGCTCTATGGTACAGCAAC |
| | | | | CGCTGGGTGTTCGGTGGAGGAACCAAACTGACTGTCCTA |
| 145. | VH-P of F7O | artificial | aa | EVQLLESGGGLVQPGGSLKLSCAASGFTFNVYAMNWVRQAPGKGLEWV |
| | | | | ARIRSKYNNYATYYADSVKKRFTISRDDSKNTAYLQMNNLKTEDTAVY |
| | | | | YCVRHGNFGNSYISWWAYWGQGTLVTVSS |
| 146. | VH-P of F7O | artificial | nt | GAGGTGCAGCTGCTCGAGTCTGGAGGAGGATTGGTGCAGCCTGGAGGG |
| | | | | TCATTGAAACTCTCATGTGCAGCCTCTGGATTCACCTTCAATGTGTAC |
| | | | | GCCATGAACTGGGTCCGCCAGGCTCCAGGAAAGGGTTTGGAATGGGTT |
| | | | | GCTCGCATAAGAAGTAAATATAATAATTATGCAACATATTATGCCGAT |
| | | | | TCAGTGAAAAAGAGGTTCACCATCTCCAGAGATGATTCAAAAAACACT |
| | | | | GCCTATCTACAAATGAACAACTTGAAAACTGAGGACACTGCCGTGTAC |
| | | | | TACTGTGTGAGACATGGGAACTTCGGTAATAGCTACATATCCTGGTGG |
| | | | | GCTTACTGGGGCCAAGGGACTCTGGTCACCGTCTCCTCA |
| 147. | VL-P of F7O | artificial | aa | ELVVTQEPSLTVSPGGTVTLTCGSSTGAVTSGYYPNWVQQKPGQAPRG |
| | | | | LIGGTKFLAPGTPARFSGSLLGGKAALTLSGVQPEDEAEYYCALWYSN |
| | | | | RWVFGGGTKLTVL |
| 148. | VL-P of F7O | artificial | nt | GAGCTCGTTGTGACTCAGGAACCTTCACTCACCGTATCACCTGGTGGA |
| | | | | ACAGTCACACTCACTTGTGGCTCCTCGACTGGGGCTGTTACATCTGGC |
| | | | | TACTACCCAAACTGGGTCCAACAAAAACCAGGTCAGGCACCCCGTGGT |
| | | | | CTAATAGGTGGGACTAAGTTCCTCGCCCCCGGTACTCCTGCCAGATTC |
| | | | | TCAGGCTCCCTGCTTGGAGGCAAGGCTGCCCTCACCCTCTCAGGGGTA |
| | | | | CAGCCAGAGGATGAGGCAGAATATTACTGTGCTCTATGGTACAGCAAC |
| | | | | CGCTGGGTGTTCGGTGGAGGAACCAAACTGACTGTCCTA |
| 149. | VH-VL of F7O | artificial | aa | EVQLVESGGGLVQPGGSLKLSCAASGFTFNVYAMNWVRQAPGKGLEWV |
| | | | | ARIRSKYNNYATYYADSVKKRFTISRDDSKNTAYLQMNNLKTEDTAVY |
| | | | | YCVRHGNFGNSYISWWAYWGQGTLVTVSSGGGGSGGGGSGGGGSQTVV |
| | | | | TQEPSLTVSPGGTVTLTCGSSTGAVTSGYYPNWVQQKPGQAPRGLIGG |
| | | | | TKFLAPGTPARFSGSLLGGKAALTLSGVQPEDEAEYYCALWYSNRWVF |
| | | | | GGGTKLTVL |
| 150. | VH-VL of F7O | artificial | nt | GAGGTGCAGCTGGTCGAGTCTGGAGGAGGATTGGTGCAGCCTGGAGGG |
| | | | | TCATTGAAACTCTCATGTGCAGCCTCTGGATTCACCTTCAATGTGTAC |
| | | | | GCCATGAACTGGGTCCGCCAGGCTCCAGGAAAGGGTTTGGAATGGGTT |
| | | | | GCTCGCATAAGAAGTAAATATAATAATTATGCAACATATTATGCCGAT |
| | | | | TCAGTGAAAAAGAGGTTCACCATCTCCAGAGATGATTCAAAAAACACT |
| | | | | GCCTATCTACAAATGAACAACTTGAAAACTGAGGACACTGCCGTGTAC |
| | | | | TACTGTGTGAGACATGGGAACTTCGGTAATAGCTACATATCCTGGTGG |
| | | | | GCTTACTGGGGCCAAGGGACTCTGGTCACCGTCTCCTCAGGTGGTGGT |
| | | | | GGTTCTGGCGGCGGCGGCTCCGGTGGTGGTGGTTCTCAGACTGTTGTG |
| | | | | ACTCAGGAACCTTCACTCACCGTATCACCTGGTGGAACAGTCACACTC |
| | | | | ACTTGTGGCTCCTCGACTGGGGCTGTTACATCTGGCTACTACCCAAAC |
| | | | | TGGGTCCAACAAAAACCAGGTCAGGCACCCCGTGGTCTAATAGGTGGG |
| | | | | ACTAAGTTCCTCGCCCCCGGTACTCCTGCCAGATTCTCAGGCTCCCTG |
| | | | | CTTGGAGGCAAGGCTGCCCTCACCCTCTCAGGGGTACAGCCAGAGGAT |
| | | | | GAGGCAGAATATTACTGTGCTCTATGGTACAGCAACCGCTGGGTGTTC |
| | | | | GGTGGAGGAACCAAACTGACTGTCCTA |
| 151. | VH-VL-P of F7O | artificial | aa | EVQLLESGGGLVQPGGSLKLSCAASGFTFNVYAMNWVRQAPGKGLEWV |
| | | | | ARIRSKYNNYATYYADSVKKRFTISRDDSKNTAYLQMNNLKTEDTAVY |
| | | | | YCVRHGNFGNSYISWWAYWGQGTLVTVSSGGGGSGGGGSGGGGSELVV |
| | | | | TQEPSLTVSPGGTVTLTCGSSTGAVTSGYYPNWVQQKPGQAPRGLIGG |
| | | | | TKFLAPGTPARFSGSLLGGKAALTLSGVQPEDEAEYYCALWYSNRWVF |
| | | | | GGGTKLTVL |
| 152. | VH-VL-P of F7O | artificial | nt | GAGGTGCAGCTGCTCGAGTCTGGAGGAGGATTGGTGCAGCCTGGAGGG |
| | | | | TCATTGAAACTCTCATGTGCAGCCTCTGGATTCACCTTCAATGTGTAC |
| | | | | GCCATGAACTGGGTCCGCCAGGCTCCAGGAAAGGGTTTGGAATGGGTT |
| | | | | GCTCGCATAAGAAGTAAATATAATAATTATGCAACATATTATGCCGAT |
| | | | | TCAGTGAAAAAGAGGTTCACCATCTCCAGAGATGATTCAAAAAACACT |
| | | | | GCCTATCTACAAATGAACAACTTGAAAACTGAGGACACTGCCGTGTAC |
| | | | | TACTGTGTGAGACATGGGAACTTCGGTAATAGCTACATATCCTGGTGG |
| | | | | GCTTACTGGGGCCAAGGGACTCTGGTCACCGTCTCCTCAGGTGGTGGT |
| | | | | GGTTCTGGCGGCGGCGGCTCCGGTGGTGGTGGTTCTGAGCTCGTTGTG |
| | | | | ACTCAGGAACCTTCACTCACCGTATCACCTGGTGGAACAGTCACACTC |
| | | | | ACTTGTGGCTCCTCGACTGGGGCTGTTACATCTGGCTACTACCCAAAC |
| | | | | TGGGTCCAACAAAAACCAGGTCAGGCACCCCGTGGTCTAATAGGTGGG |
| | | | | ACTAAGTTCCTCGCCCCCGGTACTCCTGCCAGATTCTCAGGCTCCCTG |
| | | | | CTTGGAGGCAAGGCTGCCCTCACCCTCTCAGGGGTACAGCCAGAGGAT |
| | | | | GAGGCAGAATATTACTGTGCTCTATGGTACAGCAACCGCTGGGTGTTC |
| | | | | GGTGGAGGAACCAAACTGACTGTCCTA |
| 153. | CDR-L1 of F12Q | artificial | aa | GSSTGAVTSGNYPN |
| 154. | CDR-L2 of F12Q | artificial | aa | GTKFLAP |
| 155. | CDR-L3 of F12Q | artificial | aa | VLWYSNRWV |
| 156. | CDR-H1 of F12Q | artificial | aa | SYAMN |
| 157. | CDR-H2 of F12Q | artificial | aa | RIRSKYNNYATYYADSVKG |
| 158. | CDR-H3 of F12Q | artificial | aa | HGNFGNSYVSWWAY |
| 159. | VH of F12Q | artificial | aa | EVQLVESGGGLVQPGGSLKLSCAASGFTFNSYAMNWVRQAPGKGLEWV |
| | | | | ARIRSKYNNYATYYADSVKGRFTISRDDSKNTAYLQMNNLKTEDTAVY |
| | | | | YCVRHGNFGNSYVSWWAYWGQGTLVTVSS |
| 160. | VH of F12Q | artificial | nt | GAGGTGCAGCTGGTCGAGTCTGGAGGAGGATTGGTGCAGCCTGGAGGG |
| | | | | TCATTGAAACTCTCATGTGCAGCCTCTGGATTCACCTTCAATAGCTAC |
| | | | | GCCATGAACTGGGTCCGCCAGGCTCCAGGAAAGGGTTTGGAATGGGTT |
| | | | | GCTCGCATAAGAAGTAAATATAATAATTATGCAACATATTATGCCGAT |
| | | | | TCAGTGAAAGGCAGGTTCACCATCTCCAGAGATGATTCAAAAAACACT |
| | | | | GCCTATCTACAAATGAACAACTTGAAAACTGAGGACACTGCCGTGTAC |
| | | | | TACTGTGTGAGACATGGGAACTTCGGTAATAGCTACGTTTCCTGGTGG |
| | | | | GCTTACTGGGGCCAAGGGACTCTGGTCACCGTCTCCTCA |
| 161. | VL of F12Q | artificial | aa | QTVVTQEPSLTVSPGGTVTLTCGSSTGAVTSGNYPNWVQQKPGQAPRG |
| | | | | LIGGTKFLAPGTPARFSGSLLGGKAALTLSGVQPEDEAEYYCVLWYSN |
| | | | | RWVFGGGTKLTVL |
| 162. | VL of F12Q | artificial | nt | CAGACTGTTGTGACTCAGGAACCTTCACTCACCGTATCACCTGGTGGA |
| | | | | ACAGTCACACTCACTTGTGGCTCCTCGACTGGGGCTGTTACATCTGGC |
| | | | | AACTACCCAAACTGGGTCCAACAAAAACCAGGTCAGGCACCCCGTGGT |
| | | | | CTAATAGGTGGGACTAAGTTCCTCGCCCCCGGTACTCCTGCCAGATTC |
| | | | | TCAGGCTCCCTGCTTGGAGGCAAGGCTGCCCTCACCCTCTCAGGGGTA |
| | | | | CAGCCAGAGGATGAGGCAGAATATTACTGTGTTCTATGGTACAGCAAC |
| | | | | CGCTGGGTGTTCGGTGGAGGAACCAAACTGACTGTCCTA |
| 163. | VH-P of F12Q | artificial | aa | EVQLLESGGGLVQPGGSLKLSCAASGFTFNSYAMNWVRQAPGKGLEWV |
| | | | | ARIRSKYNNYATYYADSVKGRFTISRDDSKNTAYLQMNNLKTEDTAVY |
| | | | | YCVRHGNFGNSYVSWWAYWGQGTLVTVSS |
| 164. | VH-P of F12Q | artificial | nt | GAGGTGCAGCTGCTCGAGTCTGGAGGAGGATTGGTGCAGCCTGGAGGG |
| | | | | TCATTGAAACTCTCATGTGCAGCCTCTGGATTCACCTTCAATAGCTAC |
| | | | | GCCATGAACTGGGTCCGCCAGGCTCCAGGAAAGGGTTTGGAATGGGTT |
| | | | | GCTCGCATAAGAAGTAAATATAATAATTATGCAACATATTATGCCGAT |
| | | | | TCAGTGAAAGGCAGGTTCACCATCTCCAGAGATGATTCAAAAAACACT |
| | | | | GCCTATCTACAAATGAACAACTTGAAAACTGAGGACACTGCCGTGTAC |
| | | | | TACTGTGTGAGACATGGGAACTTCGGTAATAGCTACGTTTCCTGGTGG |
| | | | | GCTTACTGGGGCCAAGGGACTCTGGTCACCGTCTCCTCA |
| 165. | VL-P of F12Q | artificial | aa | ELVVTQEPSLTVSPGGTVTLTCGSSTGAVTSGNYPNWVQQKPGQAPRG |
| | | | | LIGGTKFLAPGTPARFSGSLLGGKAALTLSGVQPEDEAEYYCVLWYSN |
| | | | | RWVFGGGTKLTVL |
| 166. | VL-P of F12Q | artificial | nt | GAGCTCGTTGTGACTCAGGAACCTTCACTCACCGTATCACCTGGTGGA |
| | | | | ACAGTCACACTCACTTGTGGCTCCTCGACTGGGGCTGTTACATCTGGC |
| | | | | AACTACCCAAACTGGGTCCAACAAAAACCAGGTCAGGCACCCCGTGGT |
| | | | | CTAATAGGTGGGACTAAGTTCCTCGCCCCCGGTACTCCTGCCAGATTC |
| | | | | TCAGGCTCCCTGCTTGGAGGCAAGGCTGCCCTCACCCTCTCAGGGGTA |
| | | | | CAGCCAGAGGATGAGGCAGAATATTACTGTGTTCTATGGTACAGCAAC |
| | | | | CGCTGGGTGTTCGGTGGAGGAACCAAACTGACTGTCCTA |
| 167. | VH-VL of F12Q | artificial | aa | EVQLVESGGGLVQPGGSLKLSCAASGFTFNSYAMNWVRQAPGKGLEWV |
| | | | | ARIRSKYNNYATYYADSVKGRFTISRDDSKNTAYLQMNNLKTEDTAVY |
| | | | | YCVRHGNFGNSYVSWWAYWGQGTLVTVSSGGGGSGGGGSGGGGSQTVV |
| | | | | TQEPSLTVSPGGTVTLTCGSSTGAVTSGNYPNWVQQKPGQAPRGLIGG |
| | | | | TKFLAPGTPARFSGSLLGGKAALTLSGVQPEDEAEYYCVLWYSNRWVF |
| | | | | GGGTKLTVL |
| 168. | VH-VL of F12Q | artificial | nt | GAGGTGCAGCTGGTCGAGTCTGGAGGAGGATTGGTGCAGCCTGGAGGG |
| | | | | TCATTGAAACTCTCATGTGCAGCCTCTGGATTCACCTTCAATAGCTAC |
| | | | | GCCATGAACTGGGTCCGCCAGGCTCCAGGAAAGGGTTTGGAATGGGTT |
| | | | | GCTCGCATAAGAAGTAAATATAATAATTATGCAACATATTATGCCGAT |
| | | | | TCAGTGAAAGGCAGGTTCACCATCTCCAGAGATGATTCAAAAAACACT |
| | | | | GCCTATCTACAAATGAACAACTTGAAAACTGAGGACACTGCCGTGTAC |
| | | | | TACTGTGTGAGACATGGGAACTTCGGTAATAGCTACGTTTCCTGGTGG |
| | | | | GCTTACTGGGGCCAAGGGACTCTGGTCACCGTCTCCTCAGGTGGTGGT |
| | | | | GGTTCTGGCGGCGGCGGCTCCGGTGGTGGTGGTTCTCAGACTGTTGTG |
| | | | | ACTCAGGAACCTTCACTCACCGTATCACCTGGTGGAACAGTCACACTC |
| | | | | ACTTGTGGCTCCTCGACTGGGGCTGTTACATCTGGCAACTACCCAAAC |
| | | | | TGGGTCCAACAAAAACCAGGTCAGGCACCCCGTGGTCTAATAGGTGGG |
| | | | | ACTAAGTTCCTCGCCCCCGGTACTCCTGCCAGATTCTCAGGCTCCCTG |
| | | | | CTTGGAGGCAAGGCTGCCCTCACCCTCTCAGGGGTACAGCCAGAGGAT |
| | | | | GAGGCAGAATATTACTGTGTTCTATGGTACAGCAACCGCTGGGTGTTC |
| | | | | GGTGGAGGAACCAAACTGACTGTCCTA |
| 169. | VH-VL-P of F12Q | artificial | aa | EVQLLESGGGLVQPGGSLKLSCAASGFTFNSYAMNWVRQAPGKGLEWV |
| | | | | ARIRSKYNNYATYYADSVKGRFTISRDDSKNTAYLQMNNLKTEDTAVY |
| | | | | YCVRHGNFGNSYVSWWAYWGQGTLVTVSSGGGGSGGGGSGGGGSELVV |
| | | | | TQEPSLTVSPGGTVTLTCGSSTGAVTSGNYPNWVQQKPGQAPRGLIGG |
| | | | | TKFLAPGTPARFSGSLLGGKAALTLSGVQPEDEAEYYCVLWYSNRWVF |
| | | | | GGGTKLTVL |
| 170. | VH-VL-P of F12Q | artificial | nt | GAGGTGCAGCTGCTCGAGTCTGGAGGAGGATTGGTGCAGCCTGGAGGG |
| | | | | TCATTGAAACTCTCATGTGCAGCCTCTGGATTCACCTTCAATAGCTAC |
| | | | | GCCATGAACTGGGTCCGCCAGGCTCCAGGAAAGGGTTTGGAATGGGTT |
| | | | | GCTCGCATAAGAAGTAAATATAATAATTATGCAACATATTATGCCGAT |
| | | | | TCAGTGAAAGGCAGGTTCACCATCTCCAGAGATGATTCAAAAAACACT |
| | | | | GCCTATCTACAAATGAACAACTTGAAAACTGAGGACACTGCCGTGTAC |
| | | | | TACTGTGTGAGACATGGGAACTTCGGTAATAGCTACGTTTCCTGGTGG |
| | | | | GCTTACTGGGGCCAAGGGACTCTGGTCACCGTCTCCTCAGGTGGTGGT |
| | | | | GGTTCTGGCGGCGGCGGCTCCGGTGGTGGTGGTTCTGAGCTCGTTGTG |
| | | | | ACTCAGGAACCTTCACTCACCGTATCACCTGGTGGAACAGTCACACTC |
| | | | | ACTTGTGGCTCCTCGACTGGGGCTGTTACATCTGGCAACTACCCAAAC |
| | | | | TGGGTCCAACAAAAACCAGGTCAGGCACCCCGTGGTCTAATAGGTGGG |
| | | | | ACTAAGTTCCTCGCCCCCGGTACTCCTGCCAGATTCTCAGGCTCCCTG |
| | | | | CTTGGAGGCAAGGCTGCCCTCACCCTCTCAGGGGTACAGCCAGAGGAT |
| | | | | GAGGCAGAATATTACTGTGTTCTATGGTACAGCAACCGCTGGGTGTTC |
| | | | | GGTGGAGGAACCAAACTGACTGTCCTA |
| 171. | CDR-L1 of I2C | artificial | aa | GSSTGAVTSGNYPN |
| 172. | CDR-L2 of I2C | artificial | aa | GTKFLAP |
| 173. | CDR-L3 of I2C | artificial | aa | VLWYSNRWV |
| 174. | CDR-H1 of I2C | artificial | aa | KYAMN |
| 175. | CDR-H2 of I2C | artificial | aa | RIRSKYNNYATYYADSVKD |
| 176. | CDR-H3 of I2C | artificial | aa | HGNFGNSYISYWAY |
| 177. | VH of I2C | artificial | aa | EVQLVESGGGLVQPGGSLKLSCAASGFTFNKYAMNWVRQAPGKGLEWV |
| | | | | ARIRSKYNNYATYYADSVKDRFTISRDDSKNTAYLQMNNLKTEDTAVY |
| | | | | YCVRHGNFGNSYISYWAYWGQGTLVTVSS |
| 178. | VH of I2C | artificial | nt | GAGGTGCAGCTGGTCGAGTCTGGAGGAGGATTGGTGCAGCCTGGAGGG |
| | | | | TCATTGAAACTCTCATGTGCAGCCTCTGGATTCACCTTCAATAAGTAC |
| | | | | GCCATGAACTGGGTCCGCCAGGCTCCAGGAAAGGGTTTGGAATGGGTT |
| | | | | GCTCGCATAAGAAGTAAATATAATAATTATGCAACATATTATGCCGAT |
| | | | | TCAGTGAAAGACAGGTTCACCATCTCCAGAGATGATTCAAAAAACACT |
| | | | | GCCTATCTACAAATGAACAACTTGAAAACTGAGGACACTGCCGTGTAC |
| | | | | TACTGTGTGAGACATGGGAACTTCGGTAATAGCTACATATCCTACTGG |
| | | | | GCTTACTGGGGCCAAGGGACTCTGGTCACCGTCTCCTCA |
| 179. | VL of I2C | artificial | aa | QTVVTQEPSLTVSPGGTVTLTCGSSTGAVTSGNYPNWVQQKPGQAPRG |
| | | | | LIGGTKFLAPGTPARFSGSLLGGKAALTLSGVQPEDEAEYYCVLWYSN |
| | | | | RWVFGGGTKLTVL |
| 180. | VL of I2C | artificial | nt | CAGACTGTTGTGACTCAGGAACCTTCACTCACCGTATCACCTGGTGGA |
| | | | | ACAGTCACACTCACTTGTGGCTCCTCGACTGGGGCTGTTACATCTGGC |
| | | | | AACTACCCAAACTGGGTCCAACAAAAACCAGGTCAGGCACCCCGTGGT |
| | | | | CTAATAGGTGGGACTAAGTTCCTCGCCCCCGGTACTCCTGCCAGATTC |
| | | | | TCAGGCTCCCTGCTTGGAGGCAAGGCTGCCCTCACCCTCTCAGGGGTA |
| | | | | CAGCCAGAGGATGAGGCAGAATATTACTGTGTTCTATGGTACAGCAAC |
| | | | | CGCTGGGTGTTCGGTGGAGGAACCAAACTGACTGTCCTA |
| 181. | VH-P of I2C | artificial | aa | EVQLLESGGGLVQPGGSLKLSCAASGFTFNKYAMNWVRQAPGKGLEWV |
| | | | | ARIRSKYNNYATYYADSVKDRFTISRDDSKNTAYLQMNNLKTEDTAVY |
| | | | | YCVRHGNFGNSYISYWAYWGQGTLVTVSS |
| 182. | VH-P of I2C | artificial | nt | GAGGTGCAGCTGCTCGAGTCTGGAGGAGGATTGGTGCAGCCTGGAGGG |
| | | | | TCATTGAAACTCTCATGTGCAGCCTCTGGATTCACCTTCAATAAGTAC |
| | | | | GCCATGAACTGGGTCCGCCAGGCTCCAGGAAAGGGTTTGGAATGGGTT |
| | | | | GCTCGCATAAGAAGTAAATATAATAATTATGCAACATATTATGCCGAT |
| | | | | TCAGTGAAAGACAGGTTCACCATCTCCAGAGATGATTCAAAAAACACT |
| | | | | GCCTATCTACAAATGAACAACTTGAAAACTGAGGACACTGCCGTGTAC |
| | | | | TACTGTGTGAGACATGGGAACTTCGGTAATAGCTACATATCCTACTGG |
| | | | | GCTTACTGGGGCCAAGGGACTCTGGTCACCGTCTCCTCA |
| 183. | VL-P of I2C | artificial | aa | ELVVTQEPSLTVSPGGTVTLTCGSSTGAVTSGNYPNWVQQKPGQAPRG |
| | | | | LIGGTKFLAPGTPARFSGSLLGGKAALTLSGVQPEDEAEYYCVLWYSN |
| | | | | RWVFGGGTKLTVL |
| 184. | VL-P of I2C | artificial | nt | GAGCTCGTTGTGACTCAGGAACCTTCACTCACCGTATCACCTGGTGGA |
| | | | | ACAGTCACACTCACTTGTGGCTCCTCGACTGGGGCTGTTACATCTGGC |
| | | | | AACTACCCAAACTGGGTCCAACAAAAACCAGGTCAGGCACCCCGTGGT |
| | | | | CTAATAGGTGGGACTAAGTTCCTCGCCCCCGGTACTCCTGCCAGATTC |
| | | | | TCAGGCTCCCTGCTTGGAGGCAAGGCTGCCCTCACCCTCTCAGGGGTA |
| | | | | CAGCCAGAGGATGAGGCAGAATATTACTGTGTTCTATGGTACAGCAAC |
| | | | | CGCTGGGTGTTCGGTGGAGGAACCAAACTGACTGTCCTA |
| 185. | VH-VL of I2C | artificial | aa | EVQLVESGGGLVQPGGSLKLSCAASGFTFNKYAMNWVRQAPGKGLEWV |
| | | | | ARIRSKYNNYATYYADSVKDRFTISRDDSKNTAYLQMNNLKTEDTAVY |
| | | | | YCVRHGNFGNSYISYWAYWGQGTLVTVSSGGGGSGGGGSGGGGSQTVV |
| | | | | TQEPSLTVSPGGTVTLTCGSSTGAVTSGNYPNWVQQKPGQAPRGLIGG |
| | | | | TKFLAPGTPARFSGSLLGGKAALTLSGVQPEDEAEYYCVLWYSNRWVF |
| | | | | GGGTKLTVL |
| 186. | VH-VL of I2C | artificial | nt | GAGGTGCAGCTGGTCGAGTCTGGAGGAGGATTGGTGCAGCCTGGAGGG |
| | | | | TCATTGAAACTCTCATGTGCAGCCTCTGGATTCACCTTCAATAAGTAC |
| | | | | GCCATGAACTGGGTCCGCCAGGCTCCAGGAAAGGGTTTGGAATGGGTT |
| | | | | GCTCGCATAAGAAGTAAATATAATAATTATGCAACATATTATGCCGAT |
| | | | | TCAGTGAAAGACAGGTTCACCATCTCCAGAGATGATTCAAAAAACACT |
| | | | | GCCTATCTACAAATGAACAACTTGAAAACTGAGGACACTGCCGTGTAC |
| | | | | TACTGTGTGAGACATGGGAACTTCGGTAATAGCTACATATCCTACTGG |
| | | | | GCTTACTGGGGCCAAGGGACTCTGGTCACCGTCTCCTCAGGTGGTGGT |
| | | | | GGTTCTGGCGGCGGCGGCTCCGGTGGTGGTGGTTCTCAGACTGTTGTG |
| | | | | ACTCAGGAACCTTCACTCACCGTATCACCTGGTGGAACAGTCACACTC |
| | | | | ACTTGTGGCTCCTCGACTGGGGCTGTTACATCTGGCAACTACCCAAAC |
| | | | | TGGGTCCAACAAAAACCAGGTCAGGCACCCCGTGGTCTAATAGGTGGG |
| | | | | ACTAAGTTCCTCGCCCCCGGTACTCCTGCCAGATTCTCAGGCTCCCTG |
| | | | | CTTGGAGGCAAGGCTGCCCTCACCCTCTCAGGGGTACAGCCAGAGGAT |
| | | | | GAGGCAGAATATTACTGTGTTCTATGGTACAGCAACCGCTGGGTGTTC |
| | | | | GGTGGAGGAACCAAACTGACTGTCCTA |
| 187. | VH-VL-P of I2C | artificial | aa | EVQLLESGGGLVQPGGSLKLSCAASGFTFNKYAMNWVRQAPGKGLEWV |
| | | | | ARIRSKYNNYATYYADSVKDRFTISRDDSKNTAYLQMNNLKTEDTAVY |
| | | | | YCVRHGNFGNSYISYWAYWGQGTLVTVSSGGGGSGGGGSGGGGSELVV |
| | | | | TQEPSLTVSPGGTVTLTCGSSTGAVTSGNYPNWVQQKPGQAPRGLIGG |
| | | | | TKFLAPGTPARFSGSLLGGKAALTLSGVQPEDEAEYYCVLWYSNRWVF |
| | | | | GGGTKLTVL |
| 188. | VH-VL-P of I2C | artificial | nt | GAGGTGCAGCTGCTCGAGTCTGGAGGAGGATTGGTGCAGCCTGGAGGG |
| | | | | TCATTGAAACTCTCATGTGCAGCCTCTGGATTCACCTTCAATAAGTAC |
| | | | | GCCATGAACTGGGTCCGCCAGGCTCCAGGAAAGGGTTTGGAATGGGTT |
| | | | | GCTCGCATAAGAAGTAAATATAATAATTATGCAACATATTATGCCGAT |
| | | | | TCAGTGAAAGACAGGTTCACCATCTCCAGAGATGATTCAAAAAACACT |
| | | | | GCCTATCTACAAATGAACAACTTGAAAACTGAGGACACTGCCGTGTAC |
| | | | | TACTGTGTGAGACATGGGAACTTCGGTAATAGCTACATATCCTACTGG |
| | | | | GCTTACTGGGGCCAAGGGACTCTGGTCACCGTCTCCTCAGGTGGTGGT |
| | | | | GGTTCTGGCGGCGGCGGCTCCGGTGGTGGTGGTTCTGAGCTCGTTGTG |
| | | | | ACTCAGGAACCTTCACTCACCGTATCACCTGGTGGAACAGTCACACTC |
| | | | | ACTTGTGGCTCCTCGACTGGGGCTGTTACATCTGGCAACTACCCAAAC |
| | | | | TGGGTCCAACAAAAACCAGGTCAGGCACCCCGTGGTCTAATAGGTGGG |
| | | | | ACTAAGTTCCTCGCCCCCGGTACTCCTGCCAGATTCTCAGGCTCCCTG |
| | | | | CTTGGAGGCAAGGCTGCCCTCACCCTCTCAGGGGTACAGCCAGAGGAT |
| | | | | GAGGCAGAATATTACTGTGTTCTATGGTACAGCAACCGCTGGGTGTTC |
| | | | | GGTGGAGGAACCAAACTGACTGTCCTA |
| 189. | 1-27 CD3ε-Fc | artificial | aa | QDGNEEMGGITQTPYKVSISGTTVILTSGEPKSCDKTHTCPPCPAPEL |
| | | | | LGGPSVFLFPPKPKDTLMISRTPEVTCVVVDVSHEDPEVKFNWYVDGV |
| | | | | EVHNAKTKPREEQYNSTYRVVSVLTVLHQDWLNGKEYKCKVSNKALPA |
| | | | | PIEKTISKAKGQPREPQVYTLPPSREEMTKNQVSLTCLVKGFYPSDIA |
| | | | | VEWESNGQPENNYKTTPPVLDSDGSFFLYSKLTVDKSRWQQGNVFSCS |
| | | | | VMHEALHNHYTQKSLSLSPGKHHHHHH |
| 190. | 1-27 CD3ε-Fc | artificial | nt | ATGGGATGGAGCTGTATCATCCTCTTCTTGGTAGCAACAGCTACAGGT |
| | | | | GTACACTCCCAAGATGGTAATGAAGAAATGGGTGGTATTACACAGACA |
| | | | | CCATATAAAGTCTCCATCTCTGGAACCACAGTAATATTGACATCCGGA |
| | | | | GAGCCCAAATCTTGTGACAAAACTCACACATGCCCACCGTGCCCAGCA |
| | | | | CCTGAACTCCTGGGGGGACCGTCAGTCTTCCTCTTCCCCCCAAAACCC |
| | | | | AAGGACACCCTCATGATCTCCCGGACCCCTGAGGTCACATGCGTGGTG |
| | | | | GTGGACGTGAGCCACGAAGACCCTGAGGTCAAGTTCAACTGGTACGTG |
| | | | | GACGGCGTGGAGGTGCATAATGCCAAGACAAAGCCGCGGGAGGAGCAG |
| | | | | TACAACAGCACGTACCGTGTGGTCAGCGTCCTCACCGTCCTGCACCAG |
| | | | | GACTGGCTGAATGGCAAGGAGTACAAGTGCAAGGTCTCCAACAAAGCC |
| | | | | CTCCCAGCCCCCATCGAGAAAACCATCTCCAAAGCCAAAGGGCAGCCC |
| | | | | CGAGAACCACAGGTGTACACCCTGCCCCCATCCCGGGAGGAGATGACC |
| | | | | AAGAACCAGGTCAGCCTGACCTGCCTGGTCAAAGGCTTCTATCCCAGC |
| | | | | GACATCGCCGTGGAGTGGGAGAGCAATGGGCAGCCGGAGAACAACTAC |
| | | | | AAGACCACGCCTCCCGTGCTGGACTCCGACGGCTCCTTCTTCCTCTAT |
| | | | | AGCAAGCTCACCGTGGACAAGAGCAGGTGGCAGCAGGGGAACGTCTTC |
| | | | | TCATGCTCCGTGATGCATGAGGCTCTGCACAACCACTACACGCAGAAG |
| | | | | AGCCTCTCCCTGTCCCCGGGTAAACATCATCACCATCATCAT |
| 191. | human 1-27 CD3□ε- | artificial | aa | QDGNEEMGGITQTPYKVSISGTTVILTDYKDDDDKTASFAAAQKECVC |
| | EpCAM | | | ENYKLAVNCFLNDNGQCQCTSIGAQNTVLCSKLAAKCLVMKAEMNGSK |
| | | | | LGRRAKPEGALQNNDGLYDPDCDESGLFKAKQCNGTSTCWCVNTAGVR |
| | | | | RTDKDTEITCSERVRTYWIIIELKHKAREKPYDVQSLRTALEEAIKTR |
| | | | | YQLDPKFITNILYEDNVITIDLVQNSSQKTQNDVDIADVAYYFEKDVK |
| | | | | GESLFHSKKMDLRVNGEQLDLDPGQTLIYYVDEKAPEFSMQGLKAGVI |
| | | | | AVIVVVVIAIVAGIVVLVISRKKRMAKYEKAEIKEMGEMHRELNA |
| 192. | human 1-27 CD3□ε- | artificial | nt | ATGGGATGGAGCTGTATCATCCTCTTCTTGGTAGCAACAGCTACAGGT |
| | EpCAM | | | GTACACTCCCAAGATGGTAATGAAGAAATGGGTGGTATTACACAGACA |
| | | | | CCATATAAAGTCTCCATCTCTGGAACCACAGTAATATTGACAGATTAC |
| | | | | AAGGACGACGATGACAAGACTGCGAGTTTTGCCGCAGCTCAGAAAGAA |
| | | | | TGTGTCTGTGAAAACTACAAGCTGGCCGTAAACTGCTTTTTGAATGAC |
| | | | | AATGGTCAATGCCAGTGTACTTCGATTGGTGCACAAAATACTGTCCTT |
| | | | | TGCTCAAAGCTGGCTGCCAAATGTTTGGTGATGAAGGCAGAAATGAAC |
| | | | | GGCTCAAAACTTGGGAGAAGAGCGAAACCTGAAGGGGCTCTCCAGAAC |
| | | | | AATGATGGCCTTTACGATCCTGACTGCGATGAGAGCGGGCTCTTTAAG |
| | | | | GCCAAGCAGTGCAACGGCACCTCCACGTGCTGGTGTGTGAACACTGCT |
| | | | | GGGGTCAGAAGAACTGACAAGGACACTGAAATAACCTGCTCTGAGCGA |
| | | | | GTGAGAACCTACTGGATCATCATTGAATTAAAACACAAAGCAAGAGAA |
| | | | | AAACCTTATGATGTTCAAAGTTTGCGGACTGCACTTGAGGAGGCGATC |
| | | | | AAAACGCGTTATCAACTGGATCCAAAATTTATCACAAATATTTTGTAT |
| | | | | GAGGATAATGTTATCACTATTGATCTGGTTCAAAATTCTTCTCAGAAA |
| | | | | ACTCAGAATGATGTGGACATAGCTGATGTGGCTTATTATTTTGAAAAA |
| | | | | GATGTTAAAGGTGAATCCTTGTTTCATTCTAAGAAAATGGACCTGAGA |
| | | | | GTAAATGGGGAACAACTGGATCTGGATCCTGGTCAAACTTTAATTTAT |
| | | | | TATGTCGATGAAAAAGCACCTGAATTCTCAATGCAGGGTCTAAAAGCT |
| | | | | GGTGTTATTGCTGTTATTGTGGTTGTGGTGATAGCAATTGTTGCTGGA |
| | | | | ATTGTTGTGCTGGTTATTTCCAGAAAGAAGAGAATGGCAAAGTATGAG |
| | | | | AAGGCTGAGATAAAGGAGATGGGTGAGATGCATAGGGAACTCAATGCA |
| 193. | marmoset 1-27 CD3□ε- | artificial | aa | QDGNEEMGDTTQNPYKVSISGTTVTLTDYKDDDDKTASFAAAQKECVC |
| | EpCAM | | | ENYKLAVNCFLNDNGQCQCTSIGAQNTVLCSKLAAKCLVMKAEMNGSK |
| | | | | LGRRAKPEGALQNNDGLYDPDCDESGLFKAKQCNGTSTCWCVNTAGVR |
| | | | | RTDKDTEITCSERVRTYWIIIELKHKAREKPYDVQSLRTALEEAIKTR |
| | | | | YQLDPKFITNILYEDNVITIDLVQNSSQKTQNDVDIADVAYYFEKDVK |
| | | | | GESLFHSKKMDLRVNGEQLDLDPGQTLIYYVDEKAPEFSMQGLKAGVI |
| | | | | AVIVVVVIAIVAGIVVLVISRKKRMAKYEKAEIKEMGEMHRELNA |
| 194. | marmoset 1-27 CD3□ε- | artificial | nt | ATGGGATGGAGCTGTATCATCCTCTTCTTGGTAGCAACAGCTACAGGT |
| | EpCAM | | | GTACACTCCCAGGACGGTAATGAAGAAATGGGTGATACTACACAGAAC |
| | | | | CCATATAAAGTTTCCATCTCAGGAACCACAGTAACACTGACAGATTAC |
| | | | | AAGGACGACGATGACAAGACTGCGAGTTTTGCCGCAGCTCAGAAAGAA |
| | | | | TGTGTCTGTGAAAACTACAAGCTGGCCGTAAACTGCTTTTTGAATGAC |
| | | | | AATGGTCAATGCCAGTGTACTTCGATTGGTGCACAAAATACTGTCCTT |
| | | | | TGCTCAAAGCTGGCTGCCAAATGTTTGGTGATGAAGGCAGAAATGAAC |
| | | | | GGCTCAAAACTTGGGAGAAGAGCGAAACCTGAAGGGGCTCTCCAGAAC |
| | | | | AATGATGGCCTTTACGATCCTGACTGCGATGAGAGCGGGCTCTTTAAG |
| | | | | GCCAAGCAGTGCAACGGCACCTCCACGTGCTGGTGTGTGAACACTGCT |
| | | | | GGGGTCAGAAGAACTGACAAGGACACTGAAATAACCTGCTCTGAGCGA |
| | | | | GTGAGAACCTACTGGATCATCATTGAATTAAAACACAAAGCAAGAGAA |
| | | | | AAACCTTATGATGTTCAAAGTTTGCGGACTGCACTTGAGGAGGCGATC |
| | | | | AAAACGCGTTATCAACTGGATCCAAAATTTATCACAAATATTTTGTAT |
| | | | | GAGGATAATGTTATCACTATTGATCTGGTTCAAAATTCTTCTCAGAAA |
| | | | | ACTCAGAATGATGTGGACATAGCTGATGTGGCTTATTATTTTGAAAAA |
| | | | | GATGTTAAAGGTGAATCCTTGTTTCATTCTAAGAAAATGGACCTGAGA |
| | | | | GTAAATGGGGAACAACTGGATCTGGATCCTGGTCAAACTTTAATTTAT |
| | | | | TATGTCGATGAAAAAGCACCTGAATTCTCAATGCAGGGTCTAAAAGCT |
| | | | | GGTGTTATTGCTGTTATTGTGGTTGTGGTGATAGCAATTGTTGCTGGA |
| | | | | ATTGTTGTGCTGGTTATTTCCAGAAAGAAGAGAATGGCAAAGTATGAG |
| | | | | AAGGCTGAGATAAAGGAGATGGGTGAGATGCATAGGGAACTCAATGCA |
| 195. | tamarin 1-27 CD3□ε- | artificial | aa | QDGNEEMGDTTQNPYKVSISGTTVTLTDYKDDDDKTASFAAAQKECVC |
| | EpCAM | | | ENYKLAVNCFLNDNGQCQCTSIGAQNTVLCSKLAAKCLVMKAEMNGSK |
| | | | | LGRRAKPEGALQNNDGLYDPDCDESGLFKAKQCNGTSTCWCVNTAGVR |
| | | | | RTDKDTEITCSERVRTYWIIIELKHKAREKPYDVQSLRTALEEAIKTR |
| | | | | YQLDPKFITNILYEDNVITIDLVQNSSQKTQNDVDIADVAYYFEKDVK |
| | | | | GESLFHSKKMDLRVNGEQLDLDPGQTLIYYVDEKAPEFSMQGLKAGVI |
| | | | | AVIVVVVIAIVAGIVVLVISRKKRMAKYEKAEIKEMGEMHRELNA |
| 196. | tamarin 1-27 CD3□ε- | artificial | nt | ATGGGATGGAGCTGTATCATCCTCTTCTTGGTAGCAACAGCTACAGGT |
| | EpCAM | | | GTACACTCCCAGGACGGTAATGAAGAAATGGGTGATACTACACAGAAC |
| | | | | CCATATAAAGTTTCCATCTCAGGAACCACAGTAACACTGACAGATTAC |
| | | | | AAGGACGACGATGACAAGACTGCGAGTTTTGCCGCAGCTCAGAAAGAA |
| | | | | TGTGTCTGTGAAAACTACAAGCTGGCCGTAAACTGCTTTTTGAATGAC |
| | | | | AATGGTCAATGCCAGTGTACTTCGATTGGTGCACAAAATACTGTCCTT |
| | | | | TGCTCAAAGCTGGCTGCCAAATGTTTGGTGATGAAGGCAGAAATGAAC |
| | | | | GGCTCAAAACTTGGGAGAAGAGCGAAACCTGAAGGGGCTCTCCAGAAC |
| | | | | AATGATGGCCTTTACGATCCTGACTGCGATGAGAGCGGGCTCTTTAAG |
| | | | | GCCAAGCAGTGCAACGGCACCTCCACGTGCTGGTGTGTGAACACTGCT |
| | | | | GGGGTCAGAAGAACTGACAAGGACACTGAAATAACCTGCTCTGAGCGA |
| | | | | GTGAGAACCTACTGGATCATCATTGAATTAAAACACAAAGCAAGAGAA |
| | | | | AAACCTTATGATGTTCAAAGTTTGCGGACTGCACTTGAGGAGGCGATC |
| | | | | AAAACGCGTTATCAACTGGATCCAAAATTTATCACAAATATTTTGTAT |
| | | | | GAGGATAATGTTATCACTATTGATCTGGTTCAAAATTCTTCTCAGAAA |
| | | | | ACTCAGAATGATGTGGACATAGCTGATGTGGCTTATTATTTTGAAAAA |
| | | | | GATGTTAAAGGTGAATCCTTGTTTCATTCTAAGAAAATGGACCTGAGA |
| | | | | GTAAATGGGGAACAACTGGATCTGGATCCTGGTCAAACTTTAATTTAT |
| | | | | TATGTCGATGAAAAAGCACCTGAATTCTCAATGCAGGGTCTAAAAGCT |
| | | | | GGTGTTATTGCTGTTATTGTGGTTGTGGTGATAGCAATTGTTGCTGGA |
| | | | | ATTGTTGTGCTGGTTATTTCCAGAAAGAAGAGAATGGCAAAGTATGAG |
| | | | | AAGGCTGAGATAAAGGAGATGGGTGAGATGCATAGGGAACTCAATGCA |
| 197. | squirrel monkey 1-27 | artificial | aa | QDGNEEIGDTTQNPYKVSISGTTVTLTDYKDDDDKTASFAAAQKECVC |
| | CD3□ε-EpCAM | | | ENYKLAVNCFLNDNGQCQCTSIGAQNTVLCSKLAAKCLVMKAEMNGSK |
| | | | | LGRRAKPEGALQNNDGLYDPDCDESGLFKAKQCNGTSTCWCVNTAGVR |
| | | | | RTDKDTEITCSERVRTYWIIIELKHKAREKPYDVQSLRTALEEAIKTR |
| | | | | YQLDPKFITNILYEDNVITIDLVQNSSQKTQNDVDIADVAYYFEKDVK |
| | | | | GESLFHSKKMDLRVNGEQLDLDPGQTLIYYVDEKAPEFSMQGLKAGVI |
| | | | | AVIVVVVIAIVAGIVVLVISRKKRMAKYEKAEIKEMGEMHRELNA |
| 198. | squirrel monkey 1-27 | artificial | nt | ATGGGATGGAGCTGTATCATCCTCTTCTTGGTAGCAACAGCTACAGGT |
| | CD3□ε-EpCAM | | | GTACACTCCCAGGACGGTAATGAAGAGATTGGTGATACTACCCAGAAC |
| | | | | CCATATAAAGTTTCCATCTCAGGAACCACAGTAACACTGACAGATTAC |
| | | | | AAGGACGACGATGACAAGACTGCGAGTTTTGCCGCAGCTCAGAAAGAA |
| | | | | TGTGTCTGTGAAAACTACAAGCTGGCCGTAAACTGCTTTTTGAATGAC |
| | | | | AATGGTCAATGCCAGTGTACTTCGATTGGTGCACAAAATACTGTCCTT |
| | | | | TGCTCAAAGCTGGCTGCCAAATGTTTGGTGATGAAGGCAGAAATGAAC |
| | | | | GGCTCAAAACTTGGGAGAAGAGCGAAACCTGAAGGGGCTCTCCAGAAC |
| | | | | AATGATGGCCTTTACGATCCTGACTGCGATGAGAGCGGGCTCTTTAAG |
| | | | | GCCAAGCAGTGCAACGGCACCTCCACGTGCTGGTGTGTGAACACTGCT |
| | | | | GGGGTCAGAAGAACTGACAAGGACACTGAAATAACCTGCTCTGAGCGA |
| | | | | GTGAGAACCTACTGGATCATCATTGAATTAAAACACAAAGCAAGAGAA |
| | | | | AAACCTTATGATGTTCAAAGTTTGCGGACTGCACTTGAGGAGGCGATC |
| | | | | AAAACGCGTTATCAACTGGATCCAAAATTTATCACAAATATTTTGTAT |
| | | | | GAGGATAATGTTATCACTATTGATCTGGTTCAAAATTCTTCTCAGAAA |
| | | | | ACTCAGAATGATGTGGACATAGCTGATGTGGCTTATTATTTTGAAAAA |
| | | | | GATGTTAAAGGTGAATCCTTGTTTCATTCTAAGAAAATGGACCTGAGA |
| | | | | GTAAATGGGGAACAACTGGATCTGGATCCTGGTCAAACTTTAATTTAT |
| | | | | TATGTCGATGAAAAAGCACCTGAATTCTCAATGCAGGGTCTAAAAGCT |
| | | | | GGTGTTATTGCTGTTATTGTGGTTGTGGTGATAGCAATTGTTGCTGGA |
| | | | | ATTGTTGTGCTGGTTATTTCCAGAAAGAAGAGAATGGCAAAGTATGAG |
| | | | | AAGGCTGAGATAAAGGAGATGGGTGAGATGCATAGGGAACTCAATGCA |
| 199. | swine 1-27 CD3□ε- | artificial | aa | QEDIERPDEDTQKTFKVSISGDKVELTDYKDDDDKTASFAAAQKECVC |
| | EpCAM | | | ENYKLAVNCFLNDNGQCQCTSIGAQNTVLCSKLAAKCLVMKAEMNGSK |
| | | | | LGRRAKPEGALQNNDGLYDPDCDESGLFKAKQCNGTSTCWCVNTAGVR |
| | | | | RTDKDTEITCSERVRTYWIIIELKHKAREKPYDVQSLRTALEEAIKTR |
| | | | | YQLDPKFITNILYEDNVITIDLVQNSSQKTQNDVDIADVAYYFEKDVK |
| | | | | GESLFHSKKMDLRVNGEQLDLDPGQTLIYYVDEKAPEFSMQGLKAGVI |
| | | | | AVIVVVVIAIVAGIVVLVISRKKRMAKYEKAEIKEMGEMHRELNA |
| 200. | swine 1-27 CD3□ε- | artificial | nt | ATGGGATGGAGCTGTATCATCCTCTTCTTGGTAGCAACAGCTACAGGT |
| | EpCAM | | | GTACACTCCCAAGAAGACATTGAAAGACCAGATGAAGATACACAGAAA |
| | | | | ACATTTAAAGTCTCCATCTCTGGAGACAAAGTAGAGCTGACAGATTAC |
| | | | | AAGGACGACGATGACAAGACTGCGAGTTTTGCCGCAGCTCAGAAAGAA |
| | | | | TGTGTCTGTGAAAACTACAAGCTGGCCGTAAACTGCTTTTTGAATGAC |
| | | | | AATGGTCAATGCCAGTGTACTTCGATTGGTGCACAAAATACTGTCCTT |
| | | | | TGCTCAAAGCTGGCTGCCAAATGTTTGGTGATGAAGGCAGAAATGAAC |
| | | | | GGCTCAAAACTTGGGAGAAGAGCGAAACCTGAAGGGGCTCTCCAGAAC |
| | | | | AATGATGGCCTTTACGATCCTGACTGCGATGAGAGCGGGCTCTTTAAG |
| | | | | GCCAAGCAGTGCAACGGCACCTCCACGTGCTGGTGTGTGAACACTGCT |
| | | | | GGGGTCAGAAGAACTGACAAGGACACTGAAATAACCTGCTCTGAGCGA |
| | | | | GTGAGAACCTACTGGATCATCATTGAATTAAAACACAAAGCAAGAGAA |
| | | | | AAACCTTATGATGTTCAAAGTTTGCGGACTGCACTTGAGGAGGCGATC |
| | | | | AAAACGCGTTATCAACTGGATCCAAAATTTATCACAAATATTTTGTAT |
| | | | | GAGGATAATGTTATCACTATTGATCTGGTTCAAAATTCTTCTCAGAAA |
| | | | | ACTCAGAATGATGTGGACATAGCTGATGTGGCTTATTATTTTGAAAAA |
| | | | | GATGTTAAAGGTGAATCCTTGTTTCATTCTAAGAAAATGGACCTGAGA |
| | | | | GTAAATGGGGAACAACTGGATCTGGATCCTGGTCAAACTTTAATTTAT |
| | | | | TATGTCGATGAAAAAGCACCTGAATTCTCAATGCAGGGTCTAAAAGCT |
| | | | | GGTGTTATTGCTGTTATTGTGGTTGTGGTGATAGCAATTGTTGCTGGA |
| | | | | ATTGTTGTGCTGGTTATTTCCAGAAAGAAGAGAATGGCAAAGTATGAG |
| | | | | AAGGCTGAGATAAAGGAGATGGGTGAGATGCATAGGGAACTCAATGCA |
| 201. | human CD3 epsilon chain | human | aa | QDGNEEMGGITQTPYKVSISGTTVILTCPQYPGSEILWQHNDKNIGGD |
| | | | | EDDKNIGSDEDHLSLKEFSELEQSGYYVCYPRGSKPEDANFYLYLRAR |
| | | | | VCENCMEMDVMSVATIVIVDICITGGLLLLVYYWSKNRKAKAKPVTRG |
| | | | | AGAGGRQRGQNKERPPPVPNPDYEPIRKGQRDLYSGLNQRRI |
| 202. | human CD3 epsilon chain | human | nt | ATGCAGTCGGGCACTCACTGGAGAGTTCTGGGCCTCTGCCTCTTATCA |
| | | | | GTTGGCGTTTGGGGGCAAGATGGTAATGAAGAAATGGGTGGTATTACA |
| | | | | CAGACACCATATAAAGTCTCCATCTCTGGAACCACAGTAATATTGACA |
| | | | | TGCCCTCAGTATCCTGGATCTGAAATACTATGGCAACACAATGATAAA |
| | | | | AACATAGGCGGTGATGAGGATGATAAAAACATAGGCAGTGATGAGGAT |
| | | | | CACCTGTCACTGAAGGAATTTTCAGAATTGGAGCAAAGTGGTTATTAT |
| | | | | GTCTGCTACCCCAGAGGAAGCAAACCAGAAGATGCGAACTTTTATCTC |
| | | | | TACCTGAGGGCACGCGTGTGTGAGAACTGCATGGAGATGGATGTGATG |
| | | | | TCGGTGGCCACAATTGTCATAGTGGACATCTGCATCACTGGGGGCTTG |
| | | | | CTGCTGCTGGTTTACTACTGGAGCAAGAATAGAAAGGCCAAGGCCAAG |
| | | | | CCTGTGACACGAGGAGCGGGTGCTGGCGGCAGGCAAAGGGGACAAAAC |
| | | | | AAGGAGAGGCCACCACCTGTTCCCAACCCAGACTATGAGCCCATCCGG |
| | | | | AAAGGCCAGCGGGACCTGTATTCTGGCCTGAATCAGAGACGCATC |
| 203. | 19 amino acid immuno- | artificial | aa | MGWSCIILFLVATATGVHS |
| | globulin leader peptide | | | |
| 204. | 19 amino acid immuno- | artificial | nt | ATGGGATGGAGCTGTATCATCCTCTTCTTGGTAGCAACAGCTACAGGT |
| | globulin leader peptide | | | GTACACTCC |
| 205. | murine IgG1 heavy chain | murine | aa | AKTTPPSVYPLAPGSAAQTNSMVTLGCLVKGYFPEPVTVTWNSGSLSS |
| | constant region | | | GVHTFPAVLQSDLYTLSSSVTVPSSTWPSETVTCNVAHPASSTKVDKK |
| | | | | IVPRDCGCKPCICTVPEVSSVFIFPPKPKDVLTITLTPKVTCVVVDIS |
| | | | | KDDPEVQFSWFVDDVEVHTAQTQPREEQFNSTFRSVSELPIMHQDWLN |
| | | | | GKEFKCRVNSAAFPAPIEKTISKTKGRPKAPQVYTIPPPKEQMAKDKV |
| | | | | SLTCMITDFFPEDITVEWQWNGQPAENYKNTQPIMDTDGSYFVYSKLN |
| | | | | VQKSNWEAGNTFTCSVLHEGLHNHHTEKSLSHSPGK |
| 206. | murine IgG1 heavy chain | murine | nt | GCCAAAACGACACCCCCATCTGTCTATCCACTGGCCCCTGGATCTGCT |
| | constant region | | | GCCCAAACTAACTCCATGGTGACCCTGGGATGCCTGGTCAAGGGCTAT |
| | | | | TTCCCTGAGCCAGTGACAGTGACCTGGAACTCTGGATCCCTGTCCAGC |
| | | | | GGTGTGCACACCTTCCCAGCTGTCCTGCAGTCTGACCTCTACACTCTG |
| | | | | AGCAGCTCAGTGACTGTCCCCTCCAGCACCTGGCCCAGCGAGACCGTC |
| | | | | ACCTGCAACGTTGCCCACCCGGCCAGCAGCACCAAGGTGGACAAGAAA |
| | | | | ATTGTGCCCAGGGATTGTGGTTGTAAGCCTTGCATATGTACAGTCCCA |
| | | | | GAAGTATCATCTGTCTTCATCTTCCCCCCAAAGCCCAAGGATGTGCTC |
| | | | | ACCATTACTCTGACTCCTAAGGTCACGTGTGTTGTGGTAGACATCAGC |
| | | | | AAGGATGATCCCGAGGTCCAGTTCAGCTGGTTTGTAGATGATGTGGAG |
| | | | | GTGCACACAGCTCAGACGCAACCCCGGGAGGAGCAGTTCAACAGCACT |
| | | | | TTCCGCTCAGTCAGTGAACTTCCCATCATGCACCAGGACTGGCTCAAT |
| | | | | GGCAAGGAGTTCAAATGCAGGGTCAACAGTGCAGCTTTCCCTGCCCCC |
| | | | | ATCGAGAAAACCATCTCCAAAACCAAAGGCAGACCGAAGGCTCCACAG |
| | | | | GTGTACACCATTCCACCTCCCAAGGAGCAGATGGCCAAGGATAAAGTC |
| | | | | AGTCTGACCTGCATGATAACAGACTTCTTCCCTGAAGACATTACTGTG |
| | | | | GAGTGGCAGTGGAATGGGCAGCCAGCGGAGAACTACAAGAACACTCAG |
| | | | | CCCATCATGGACACAGATGGCTCTTACTTCGTCTACAGCAAGCTCAAT |
| | | | | GTGCAGAAGAGCAACTGGGAGGCAGGAAATACTTTCACCTGCTCTGTG |
| | | | | TTACATGAGGGCCTGCACAACCACCATACTGAGAAGAGCCTCTCCCAC |
| | | | | TCTCCTGGTAAA |
| 207. | human lambda light chain | human | aa | GQPKAAPSVTLFPPSSEELQANKATLVCLISDFYPGAVTVAWKADSSP |
| | constant region | | | VKAGVETTTPSKQSNNKYAASSYLSLTPEQWKSHKSYSCQVTHEGSTV |
| | | | | EKTVAPTECS |
| 208. | human lambda light chain | human | nt | GGTCAGCCCAAGGCTGCCCCCTCGGTCACTCTGTTCCCACCCTCCTCT |
| | constant region | | | GAGGAGCTTCAAGCCAACAAGGCCACACTGGTGTGTCTCATAAGTGAC |
| | | | | TTCTACCCGGGAGCCGTGACAGTGGCCTGGAAGGCAGATAGCAGCCCC |
| | | | | GTCAAGGCGGGAGTGGAGACCACCACACCCTCCAAACAAAGCAACAAC |
| | | | | AAGTACGCGGCCAGCAGCTACCTGAGCCTGACGCCTGAGCAGTGGAAG |
| | | | | TCCCACAAAAGCTACAGCTGCCAGGTCACGCATGAAGGGAGCACCGTG |
| | | | | GAGAAGACAGTGGCCCCTACAGAATGTTCA |
| 209. | 1-27 CD3-Fc + Leader | artificial | nt | ATGGGATGGAGCTGTATCATCCTCTTCTTGGTAGCAACAGCTACAGGT |
| | | | | GTACACTCCCAAGATGGTAATGAAGAAATGGGTGGTATTACACAGACA |
| | | | | CCATATAAAGTCTCCATCTCTGGAACCACAGTAATATTGACATCCGGA |
| | | | | GAGCCCAAATCTTGTGACAAAACTCACACATGCCCACCGTGCCCAGCA |
| | | | | CCTGAACTCCTGGGGGGACCGTCAGTCTTCCTCTTCCCCCCAAAACCC |
| | | | | AAGGACACCCTCATGATCTCCCGGACCCCTGAGGTCACATGCGTGGTG |
| | | | | GTGGACGTGAGCCACGAAGACCCTGAGGTCAAGTTCAACTGGTACGTG |
| | | | | GACGGCGTGGAGGTGCATAATGCCAAGACAAAGCCGCGGGAGGAGCAG |
| | | | | TACAACAGCACGTACCGTGTGGTCAGCGTCCTCACCGTCCTGCACCAG |
| | | | | GACTGGCTGAATGGCAAGGAGTACAAGTGCAAGGTCTCCAACAAAGCC |
| | | | | CTCCCAGCCCCCATCGAGAAAACCATCTCCAAAGCCAAAGGGCAGCCC |
| | | | | CGAGAACCACAGGTGTACACCCTGCCCCCATCCCGGGAGGAGATGACC |
| | | | | AAGAACCAGGTCAGCCTGACCTGCCTGGTCAAAGGCTTCTATCCCAGC |
| | | | | GACATCGCCGTGGAGTGGGAGAGCAATGGGCAGCCGGAGAACAACTAC |
| | | | | AAGACCACGCCTCCCGTGCTGGACTCCGACGGCTCCTTCTTCCTCTAT |
| | | | | AGCAAGCTCACCGTGGACAAGAGCAGGTGGCAGCAGGGGAACGTCTTC |
| | | | | TCATGCTCCGTGATGCATGAGGCTCTGCACAACCACTACACGCAGAAG |
| | | | | AGCCTCTCCCTGTCCCCGGGTAAATAG |
| 210. | 1-27 CD3-Fc + Leader | artificial | aa | MGWSCIILFLVATATGVHSQDGNEEMGGITQTPYKVSISGTTVILTSG |
| | | | | EPKSCDKTHTCPPCPAPELLGGPSVFLFPPKPKDTLMISRTPEVTCVV |
| | | | | VDVSHEDPEVKFNWYVDGVEVHNAKTKPREEQYNSTYRVVSVLTVLHQ |
| | | | | DWLNGKEYKCKVSNKALPAPIEKTISKAKGQPREPQVYTLPPSREEMT |
| | | | | KNQVSLTCLVKGFYPSDIAVEWESNGQPENNYKTTPPVLDSDGSFFLY |
| | | | | SKLTVDKSRWQQGNVFSCSVMHEALHNHYTQKSLSLSPGK |
| 211. | Human CD3ε□ 1-8 | human | aa | QDGNEEMG |
| | (N-terminus) | | | |
| 212. | Saimiri sciureus CD3ε | Saimiri | aa | QDGNEEIG |
| | 1-8 (N-terminus) | sciureus | | |
| 213. | forward primer | artificial | nt | CACTGTGGCCCAGGTTCGAGG |
| 214. | reverse primer | artificial | nt | GACATACCACACAAATTCAATACGG |
| 215. | forward primer | artificial | nt | GCTCTGCTCGCGCCGAGATGTGG |
| 216. | reverse primer | artificial | nt | ACGCTGGACACCACCTCCAGG |
| 217. | forward primer | artificial | nt | GGTTCTACTGAGTGGGCAGAGG |
| 218. | reverse primer | artificial | nt | ACTTGTTGTGGCTGCTTGGAGC |
| 219. | forward primer | artificial | nt | GGGTGAAGTCCTATCCAGATGG |
| 220. | reverse primer | artificial | nt | GTGCTCTGCCTGAAGCAATTCC |
| 221. | forward primer | artificial | nt | CTCGGCTTCCTCTTCGGGTGG |
| 222. | reverse primer | artificial | nt | GCATATTCATTTGCTGGGTAACCTGG |
| 223. | macaque PSMA | artificial | nt | ATGTGGAATCTCCTGCACGAAACCGACTCGGCTGTGGCCACCGCGCGC |
| | (Cynomolgus) | | | CGCCCGCGCTGGCTGTGCGCTGGGGCACTGGTGCTGGCGGGTGGCTTC |
| | | | | TTTCTCCTCGGCTTCCTCTTCGGATGGTTTATAAAATCCTCCAGTGAA |
| | | | | GCTACTAACATTACTCCAAAGCATAATATGAAAGCATTTTTGGATGAA |
| | | | | CTGAAAGCTGAGAACATCAAGAAGTTCTTACATAATTTTACACAGATA |
| | | | | CCACATTTAGCAGGAACAGAACAAAACTTTCAACTTGCAAAGCAAATT |
| | | | | CAATCCCAGTGGAAAGAATTTGGCCTGGATTCTGTTGAGCTAACTCAT |
| | | | | TATGATGTCCTGTTGTCCTACCCAAATAAGACTCATCCCAACTACATC |
| | | | | TCAATAATTAATGAAGATGGAAATGAGATTTTCAACACATCATTATTT |
| | | | | GAACCACCTCCTGCAGGATATGAAAATGTTTCGGATATTGTACCACCT |
| | | | | TTCAGTGCTTTCTCTCCTCAAGGAATGCCAGAGGGCGATCTAGTGTAT |
| | | | | GTTAACTATGCACGAACTGAAGACTTCTTTAAATTGGAACGGGACATG |
| | | | | AAAATCAATTGCTCTGGGAAAATTGTAATTGCCAGATATGGGAAAGTT |
| | | | | TTCAGAGGAAATAAGGTTAAAAATGCCCAGCTGGCAGGGGCCACAGGA |
| | | | | GTCATTCTCTACTCAGACCCTGCTGACTACTTTGCTCCTGGGGTAAAG |
| | | | | TCTTATCCAGATGGTTGGAATCTTCCTGGAGGTGGTGTCCAGCGTGGA |
| | | | | AATATCCTAAATCTGAATGGTGCAGGAGACCCTCTCACACCAGGTTAC |
| | | | | CCAGCAAATGAATATGCTTATAGGCGTGGAATGGCAGAGGCTGTTGGT |
| | | | | CTTCCAAGTATTCCCGTTCATCCAATTGGGTACTATGATGCACAGAAG |
| | | | | CTCCTAGAAAAAATGGGTGGCTCAGCATCACCAGATAGCAGCTGGAGA |
| | | | | GGAAGTCTCAAAGTGCCCTACAATGTTGGACCTGGCTTTACTGGAAAC |
| | | | | TTTTCTACACAAAAAGTCAAGATGCACATCCACTCTACCAGTGAAGTG |
| | | | | ACAAGAATTTACAATGTGATAGGTACTCTCAGAGGAGCAGTGGAACCA |
| | | | | GACAGATACGTCATTCTGGGAGGTCACCGGGACTCATGGGTGTTTGGT |
| | | | | GGTATTGACCCTCAGAGTGGAGCAGCTGTTGTTCATGAAATTGTGAGG |
| | | | | AGCTTTGGAACGCTGAAAAAGGAAGGGTGGAGACCTAGAAGAACAATT |
| | | | | TTGTTTGCAAGCTGGGATGCAGAAGAATTTGGTCTTCTTGGTTCTACT |
| | | | | GAATGGGCAGAGGAGAATTCAAGACTCCTTCAAGAGCGTGGCGTGGCT |
| | | | | TATATTAATGCTGATTCGTCTATAGAGGGAAACTACACTCTGAGAGTT |
| | | | | GATTGTACACCACTGATGTACAGCTTGGTATACAACCTAACAAAAGAG |
| | | | | CTGGAAAGCCCTGATGAAGGCTTTGAAGGCAAATCTCTTTATGAAAGT |
| | | | | TGGACTAAAAAAAGTCCTTCCCCCGAGTTCAGTGGCATGCCCAGGATA |
| | | | | AGCAAATTGGGATCTGGAAATGATTTTGAGGTGTTCTTCCAACGACTT |
| | | | | GGAATTGCCTCAGGCAGAGCACGGTATACTAAAAATTGGGAAACAAAC |
| | | | | AAATTCAGCAGCTATCCACTGTATCACAGTGTCTATGAGACATATGAG |
| | | | | TTGGTGGAAAAGTTTTATGATCCAATGTTTAAATATCACCTCACTGTG |
| | | | | GCCCAGGTTCGAGGAGGGATGGTGTTTGAACTAGCCAATTCCGTAGTG |
| | | | | CTCCCTTTTGATTGTCGAGATTATGCTGTAGTTTTAAGAAAGTATGCT |
| | | | | GACAAAATCTACAATATTTCTATGAAACATCCACAGGAAATGAAGACA |
| | | | | TACAGTGTATCATTTGATTCACTTTTTTCTGCAGTAAAGAATTTTACA |
| | | | | GAAATTGCTTCCAAGTTCAGCGAGAGACTCCGGGACTTTGACAAAAGC |
| | | | | AACCCAATATTATTAAGAATGATGAATGATCAACTCATGTTTCTGGAA |
| | | | | AGAGCATTTATTGATCCATTAGGGTTACCAGACAGACCTTTTTATAGG |
| | | | | CATGTCATCTATGCTCCAAGCAGCCACAACAAGTATGCAGGGGAGTCA |
| | | | | TTCCCAGGAATTTATGATGCTCTGTTTGATATCGAAAGCAAAGTGGAC |
| | | | | CCTTCCCAGGCCTGGGGAGAAGTGAAGAGACAGATTTCTGTTGCAACC |
| | | | | TTCACAGTGCAAGCAGCTGCAGAGACTTTGAGTGAAGTGGCCTAA |
| 224. | macaque PSMA | artificial | aa | MWNLLHETDSAVATARRPRWLCAGALVLAGGFFLLGFLFGWFIKSSSE |
| | (Cynomolgus) | | | ATNITPKHNMKAFLDELKAENIKKFLHNFTQIPHLAGTEQNFQLAKQI |
| | | | | QSQWKEFGLDSVELTHYDVLLSYPNKTHPNYISIINEDGNEIFNTSLF |
| | | | | EPPPAGYENVSDIVPPFSAFSPQGMPEGDLVYVNYARTEDFFKLERDM |
| | | | | KINCSGKIVIARYGKVFRGNKVKNAQLAGATGVILYSDPADYFAPGVK |
| | | | | SYPDGWNLPGGGVQRGNILNLNGAGDPLTPGYPANEYAYRRGMAEAVG |
| | | | | LPSIPVHPIGYYDAQKLLEKMGGSASPDSSWRGSLKVPYNVGPGFTGN |
| | | | | FSTQKVKMHIHSTSEVTRIYNVIGTLRGAVEPDRYVILGGHRDSWVFG |
| | | | | GIDPQSGAAVVHEIVRSFGTLKKEGWRPRRTILFASWDAEEFGLLGST |
| | | | | EWAEENSRLLQERGVAYINADSSIEGNYTLRVDCTPLMYSLVYNLTKE |
| | | | | LESPDEGFEGKSLYESWTKKSPSPEFSGMPRISKLGSGNDFEVFFQRL |
| | | | | GIASGRARYTKNWETNKFSSYPLYHSVYETYELVEKFYDPMFKYHLTV |
| | | | | AQVRGGMVFELANSVVLPFDCRDYAVVLRKYADKIYNISMKHPQEMKT |
| | | | | YSVSFDSLFSAVKNFTEIASKFSERLRDFDKSNPILLRMMNDQLMFLE |
| | | | | RAFIDPLGLPDRPFYRHVIYAPSSHNKYAGESFPGIYDALFDIESKVD |
| | | | | PSQAWGEVKRQISVATFTVQAAAETLSEVA |
| 225. | PM52C3-VH | artificial | aa | QVQLVQSGAEVKKPGASVKLSCKASGYTFTYFDINWVRQTPEQGLEWM |
| | | | | GGISPGDGNTNYNENFKGRVTMTRDTSSSTAYMELSRLRSDDTAVYYC |
| | | | | ARDGNFPYYAMDSWGQGTTVTVSS |
| 226. | PM52C3-HCDR1 | artificial | aa | YFDIN |
| 227. | PM52C3-HCDR2 | artificial | aa | GISPGDGNTNYNENFKG |
| 228. | PM52C3-HCDR3 | artificial | aa | DGNFPYYAMDS |
| 229. | PM52C3-VH | artificial | nt | CAGGTGCAGCTGGTCCAGTCTGGCGCCGAAGTGAAGAAGCCTGGCGCC |
| | | | | TCCGTGAAGCTGTCCTGCAAGGCCTCCGGCTACACCTTCACCTACTTC |
| | | | | GACATCAACTGGGTGCGGCAGACGCCTGAGCAGGGCCTGGAATGGATG |
| | | | | GGCGGCATCTCCCCTGGCGACGGCAACACCAACTACAACGAGAACTTC |
| | | | | AAGGGCAGGGTCACAATGACCAGAGACACGTCCTCATCCACCGCCTAC |
| | | | | ATGGAGCTGTCCCGGCTGAGATCTGACGACACCGCCGTGTACTACTGC |
| | | | | GCCAGGGACGGCAACTTCCCTTACTACGCCATGGACTCTTGGGGCCAG |
| | | | | GGCACCACGGTCACCGTCTCCTCA |
| 230. | PM52C3-VL | artificial | aa | DVVMTQSPLSLPVTLGEPASISCRSSQSLVYSNGNTYLHWYQQKPGQS |
| | | | | PRLLIYKVSNRFSGVPDRFSGSGSGTDFTLKISRVEAEDVGVYFCSQS |
| | | | | THVPYTFGQGTKLEIK |
| 231. | PM52C3-LCDR1 | artificial | aa | RSSQSLVYSNGNTYLH |
| 232. | PM52C3-LCDR2 | artificial | aa | KVSNRFS |
| 233. | PM52C3-LCDR3 | artificial | aa | SQSTHVPYT |
| 234. | PM52C3-VL | artificial | nt | GACGTCGTGATGACTCAGTCTCCACTCTCCCTGCCCGTCACCCTTGGA |
| | | | | GAGCCGGCCTCCATCTCCTGCAGGTCTAGTCAAAGCCTCGTATACAGT |
| | | | | AACGGAAACACCTACTTGCATTGGTATCAACAGAAGCCAGGCCAATCT |
| | | | | CCAAGACTCCTAATTTATAAGGTTTCTAACCGGTTCTCTGGGGTCCCA |
| | | | | GACAGATTCAGCGGCAGTGGGTCAGGCACTGATTTCACACTGAAAATC |
| | | | | AGCAGGGTGGAGGCTGAGGATGTTGGGGTTTATTTCTGCTCTCAAAGT |
| | | | | ACACATGTTCCGTACACGTTTGGCCAGGGGACCAAGCTGGAGATCAAA |
| 235. | PM52C3-VH-VL | artificial | aa | QVQLVQSGAEVKKPGASVKLSCKASGYTFTYFDINWVRQTPEQGLEWM |
| | | | | GGISPGDGNTNYNENFKGRVTMTRDTSSSTAYMELSRLRSDDTAVYYC |
| | | | | ARDGNFPYYAMDSWGQGTTVTVSSGGGGSGGGGSGGGGSDVVMTQSPL |
| | | | | SLPVTLGEPASISCRSSQSLVYSNGNTYLHWYQQKPGQSPRLLIYKVS |
| | | | | NRFSGVPDRFSGSGSGTDFTLKISRVEAEDVGVYFCSQSTHVPYTFGQ |
| | | | | GTKLEIK |
| 236. | PM52C3-VH-VL | artificial | nt | CAGGTGCAGCTGGTCCAGTCTGGCGCCGAAGTGAAGAAGCCTGGCGCC |
| | | | | TCCGTGAAGCTGTCCTGCAAGGCCTCCGGCTACACCTTCACCTACTTC |
| | | | | GACATCAACTGGGTGCGGCAGACGCCTGAGCAGGGCCTGGAATGGATG |
| | | | | GGCGGCATCTCCCCTGGCGACGGCAACACCAACTACAACGAGAACTTC |
| | | | | AAGGGCAGGGTCACAATGACCAGAGACACGTCCTCATCCACCGCCTAC |
| | | | | ATGGAGCTGTCCCGGCTGAGATCTGACGACACCGCCGTGTACTACTGC |
| | | | | GCCAGGGACGGCAACTTCCCTTACTACGCCATGGACTCTTGGGGCCAG |
| | | | | GGCACCACGGTCACCGTCTCCTCAGGTGGTGGTGGTTCTGGCGGCGGC |
| | | | | GGCTCCGGTGGTGGTGGTTCTGACGTCGTGATGACTCAGTCTCCACTC |
| | | | | TCCCTGCCCGTCACCCTTGGAGAGCCGGCCTCCATCTCCTGCAGGTCT |
| | | | | AGTCAAAGCCTCGTATACAGTAACGGAAACACCTACTTGCATTGGTAT |
| | | | | CAACAGAAGCCAGGCCAATCTCCAAGACTCCTAATTTATAAGGTTTCT |
| | | | | AACCGGTTCTCTGGGGTCCCAGACAGATTCAGCGGCAGTGGGTCAGGC |
| | | | | ACTGATTTCACACTGAAAATCAGCAGGGTGGAGGCTGAGGATGTTGGG |
| | | | | GTTTATTTCTGCTCTCAAAGTACACATGTTCCGTACACGTTTGGCCAG |
| | | | | GGGACCAAGCTGGAGATCAAA |
| 237. | PM52C3 VH-VL × I2C | artificial | aa | QVQLVQSGAEVKKPGASVKLSCKASGYTFTYFDINWVRQTPEQGLEWM |
| | VH-VL | | | GGISPGDGNTNYNENFKGRVTMTRDTSSSTAYMELSRLRSDDTAVYYC |
| | | | | ARDGNFPYYAMDSWGQGTTVTVSSGGGGSGGGGSGGGGSDVVMTQSPL |
| | | | | SLPVTLGEPASISCRSSQSLVYSNGNTYLHWYQQKPGQSPRLLIYKVS |
| | | | | NRFSGVPDRFSGSGSGTDFTLKISRVEAEDVGVYFCSQSTHVPYTFGQ |
| | | | | GTKLEIKSGGGGSEVQLVESGGGLVQPGGSLKLSCAASGFTFNKYAMN |
| | | | | WVRQAPGKGLEWVARIRSKYNNYATYYADSVKDRFTISRDDSKNTAYL |
| | | | | QMNNLKTEDTAVYYCVRHGNFGNSYISYWAYWGQGTLVTVSSGGGGSG |
| | | | | GGGSGGGGSQTVVTQEPSLTVSPGGTVTLTCGSSTGAVTSGNYPNWVQ |
| | | | | QKPGQAPRGLIGGTKFLAPGTPARFSGSLLGGKAALTLSGVQPEDEAE |
| | | | | YYCVLWYSNRWVFGGGTKLTVL |
| 238. | PM52C3 VH-VL × I2C | artificial | nt | CAGGTGCAGCTGGTCCAGTCTGGCGCCGAAGTGAAGAAGCCTGGCGCC |
| | VH-VL | | | TCCGTGAAGCTGTCCTGCAAGGCCTCCGGCTACACCTTCACCTACTTC |
| | | | | GACATCAACTGGGTGCGGCAGACGCCTGAGCAGGGCCTGGAATGGATG |
| | | | | GGCGGCATCTCCCCTGGCGACGGCAACACCAACTACAACGAGAACTTC |
| | | | | AAGGGCAGGGTCACAATGACCAGAGACACGTCCTCATCCACCGCCTAC |
| | | | | ATGGAGCTGTCCCGGCTGAGATCTGACGACACCGCCGTGTACTACTGC |
| | | | | GCCAGGGACGGCAACTTCCCTTACTACGCCATGGACTCTTGGGGCCAG |
| | | | | GGCACCACGGTCACCGTCTCCTCAGGTGGTGGTGGTTCTGGCGGCGGC |
| | | | | GGCTCCGGTGGTGGTGGTTCTGACGTCGTGATGACTCAGTCTCCACTC |
| | | | | TCCCTGCCCGTCACCCTTGGAGAGCCGGCCTCCATCTCCTGCAGGTCT |
| | | | | AGTCAAAGCCTCGTATACAGTAACGGAAACACCTACTTGCATTGGTAT |
| | | | | CAACAGAAGCCAGGCCAATCTCCAAGACTCCTAATTTATAAGGTTTCT |
| | | | | AACCGGTTCTCTGGGGTCCCAGACAGATTCAGCGGCAGTGGGTCAGGC |
| | | | | ACTGATTTCACACTGAAAATCAGCAGGGTGGAGGCTGAGGATGTTGGG |
| | | | | GTTTATTTCTGCTCTCAAAGTACACATGTTCCGTACACGTTTGGCCAG |
| | | | | GGGACCAAGCTGGAGATCAAATCCGGAGGTGGTGGATCCGAGGTGCAG |
| | | | | CTGGTCGAGTCTGGAGGAGGATTGGTGCAGCCTGGAGGGTCATTGAAA |
| | | | | CTCTCATGTGCAGCCTCTGGATTCACCTTCAATAAGTACGCCATGAAC |
| | | | | TGGGTCCGCCAGGCTCCAGGAAAGGGTTTGGAATGGGTTGCTCGCATA |
| | | | | AGAAGTAAATATAATAATTATGCAACATATTATGCCGATTCAGTGAAA |
| | | | | GACAGGTTCACCATCTCCAGAGATGATTCAAAAAACACTGCCTATCTA |
| | | | | CAAATGAACAACTTGAAAACTGAGGACACTGCCGTGTACTACTGTGTG |
| | | | | AGACATGGGAACTTCGGTAATAGCTACATATCCTACTGGGCTTACTGG |
| | | | | GGCCAAGGGACTCTGGTCACCGTCTCCTCAGGTGGTGGTGGTTCTGGC |
| | | | | GGCGGCGGCTCCGGTGGTGGTGGTTCTCAGACTGTTGTGACTCAGGAA |
| | | | | CCTTCACTCACCGTATCACCTGGTGGAACAGTCACACTCACTTGTGGC |
| | | | | TCCTCGACTGGGGCTGTTACATCTGGCAACTACCCAAACTGGGTCCAA |
| | | | | CAAAAACCAGGTCAGGCACCCCGTGGTCTAATAGGTGGGACTAAGTTC |
| | | | | CTCGCCCCCGGTACTCCTGCCAGATTCTCAGGCTCCCTGCTTGGAGGC |
| | | | | AAGGCTGCCCTCACCCTCTCAGGGGTACAGCCAGAGGATGAGGCAGAA |
| | | | | TATTACTGTGTTCTATGGTACAGCAACCGCTGGGTGTTCGGTGGAGGA |
| | | | | ACCAAACTGACTGTCCTA |
| 239. | PM52H3-VH | artificial | aa | QVQLVQSGAEVKKPGASVKLSCKASGYTFTYFDINWVRQTPEQGLEWM |
| | | | | GGISPGDGNTNYNENFKGRVTMTRDTSKSTAYMELSRLRSDDTAVYYC |
| | | | | ARDGNFPYYAMDSWGQGTTVTVSS |
| 240. | PM52H3-HCDR1 | artificial | aa | YFDIN |
| 241. | PM52H3-HCDR2 | artificial | aa | GISPGDGNTNYNENFKG |
| 242. | PM52H3-HCDR3 | artificial | aa | DGNFPYYAMDS |
| 243. | PM52H3-VH | artificial | nt | CAGGTGCAGCTGGTCCAGTCTGGCGCCGAAGTGAAGAAGCCTGGCGCC |
| | | | | TCCGTGAAGCTGTCCTGCAAGGCCTCCGGCTACACCTTCACCTACTTC |
| | | | | GACATCAACTGGGTGCGGCAGACGCCTGAGCAGGGCCTGGAATGGATG |
| | | | | GGCGGCATCTCCCCTGGCGACGGCAACACCAACTACAACGAGAACTTC |
| | | | | AAGGGCAGGGTCACAATGACCAGAGACACGTCCAAATCCACCGCCTAC |
| | | | | ATGGAGCTGTCCCGGCTGAGATCTGACGACACCGCCGTGTACTACTGC |
| | | | | GCCAGGGACGGCAACTTCCCTTACTACGCCATGGACTCTTGGGGCCAG |
| | | | | GGCACCACGGTCACCGTCTCCTCA |
| 244. | PM52H3-VL | artificial | aa | DVVMTQSPLSLPVTLGEPASISCRSSQSLVYSNGNTYLHWYQQKPGQS |
| | | | | PRLLIYKVSNRFSGVPDRFSGSGSGTDFTLKISRVEAEDVGVYFCSQS |
| | | | | THVPYTFGQGTKLEIK |
| 245. | PM52H3-LCDR1 | artificial | aa | RSSQSLVYSNGNTYLH |
| 246. | PM52H3-LCDR2 | artificial | aa | KVSNRFS |
| 247. | PM52H3-LCDR3 | artificial | aa | SQSTHVPYT |
| 248. | PM52H3-VL | artificial | nt | GACGTCGTGATGACTCAGTCTCCACTCTCCCTGCCCGTCACCCTTGGA |
| | | | | GAGCCGGCCTCCATCTCCTGCAGGTCTAGTCAAAGCCTCGTATACAGT |
| | | | | AACGGAAACACCTACTTGCATTGGTATCAACAGAAGCCAGGCCAATCT |
| | | | | CCAAGACTCCTAATTTATAAGGTTTCTAACCGGTTCTCTGGGGTCCCA |
| | | | | GACAGATTCAGCGGCAGTGGGTCAGGCACTGATTTCACACTGAAAATC |
| | | | | AGCAGGGTGGAGGCTGAGGATGTTGGGGTTTATTTCTGCTCTCAAAGT |
| | | | | ACACATGTTCCGTACACGTTTGGCCAGGGGACCAAGCTGGAGATCAAA |
| 249. | PM52H3-VH-VL | artificial | aa | QVQLVQSGAEVKKPGASVKLSCKASGYTFTYFDINWVRQTPEQGLEWM |
| | | | | GGISPGDGNTNYNENFKGRVTMTRDTSKSTAYMELSRLRSDDTAVYYC |
| | | | | ARDGNFPYYAMDSWGQGTTVTVSSGGGGSGGGGSGGGGSDVVMTQSPL |
| | | | | SLPVTLGEPASISCRSSQSLVYSNGNTYLHWYQQKPGQSPRLLIYKVS |
| | | | | NRFSGVPDRFSGSGSGTDFTLKISRVEAEDVGVYFCSQSTHVPYTFGQ |
| | | | | GTKLEIK |
| 250. | PM52H3-VH-VL | artificial | nt | CAGGTGCAGCTGGTCCAGTCTGGCGCCGAAGTGAAGAAGCCTGGCGCC |
| | | | | TCCGTGAAGCTGTCCTGCAAGGCCTCCGGCTACACCTTCACCTACTTC |
| | | | | GACATCAACTGGGTGCGGCAGACGCCTGAGCAGGGCCTGGAATGGATG |
| | | | | GGCGGCATCTCCCCTGGCGACGGCAACACCAACTACAACGAGAACTTC |
| | | | | AAGGGCAGGGTCACAATGACCAGAGACACGTCCAAATCCACCGCCTAC |
| | | | | ATGGAGCTGTCCCGGCTGAGATCTGACGACACCGCCGTGTACTACTGC |
| | | | | GCCAGGGACGGCAACTTCCCTTACTACGCCATGGACTCTTGGGGCCAG |
| | | | | GGCACCACGGTCACCGTCTCCTCAGGTGGTGGTGGTTCTGGCGGCGGC |
| | | | | GGCTCCGGTGGTGGTGGTTCTGACGTCGTGATGACTCAGTCTCCACTC |
| | | | | TCCCTGCCCGTCACCCTTGGAGAGCCGGCCTCCATCTCCTGCAGGTCT |
| | | | | AGTCAAAGCCTCGTATACAGTAACGGAAACACCTACTTGCATTGGTAT |
| | | | | CAACAGAAGCCAGGCCAATCTCCAAGACTCCTAATTTATAAGGTTTCT |
| | | | | AACCGGTTCTCTGGGGTCCCAGACAGATTCAGCGGCAGTGGGTCAGGC |
| | | | | ACTGATTTCACACTGAAAATCAGCAGGGTGGAGGCTGAGGATGTTGGG |
| | | | | GTTTATTTCTGCTCTCAAAGTACACATGTTCCGTACACGTTTGGCCAG |
| | | | | GGGACCAAGCTGGAGATCAAA |
| 251. | PM52H3 VH-VL × I2C | artificial | aa | QVQLVQSGAEVKKPGASVKLSCKASGYTFTYFDINWVRQTPEQGLEWM |
| | VH-VL | | | GGISPGDGNTNYNENFKGRVTMTRDTSKSTAYMELSRLRSDDTAVYYC |
| | | | | ARDGNFPYYAMDSWGQGTTVTVSSGGGGSGGGGSGGGGSDVVMTQSPL |
| | | | | SLPVTLGEPASISCRSSQSLVYSNGNTYLHWYQQKPGQSPRLLIYKVS |
| | | | | NRFSGVPDRFSGSGSGTDFTLKISRVEAEDVGVYFCSQSTHVPYTFGQ |
| | | | | GTKLEIKSGGGGSEVQLVESGGGLVQPGGSLKLSCAASGFTFNKYAMN |
| | | | | WVRQAPGKGLEWVARIRSKYNNYATYYADSVKDRFTISRDDSKNTAYL |
| | | | | QMNNLKTEDTAVYYCVRHGNFGNSYISYWAYWGQGTLVTVSSGGGGSG |
| | | | | GGGSGGGGSQTVVTQEPSLTVSPGGTVTLTCGSSTGAVTSGNYPNWVQ |
| | | | | QKPGQAPRGLIGGTKFLAPGTPARFSGSLLGGKAALTLSGVQPEDEAE |
| | | | | YYCVLWYSNRWVFGGGTKLTVL |
| 252. | PM52H3 VH-VL × I2C | artificial | nt | CAGGTGCAGCTGGTCCAGTCTGGCGCCGAAGTGAAGAAGCCTGGCGCC |
| | VH-VL | | | TCCGTGAAGCTGTCCTGCAAGGCCTCCGGCTACACCTTCACCTACTTC |
| | | | | GACATCAACTGGGTGCGGCAGACGCCTGAGCAGGGCCTGGAATGGATG |
| | | | | GGCGGCATCTCCCCTGGCGACGGCAACACCAACTACAACGAGAACTTC |
| | | | | AAGGGCAGGGTCACAATGACCAGAGACACGTCCAAATCCACCGCCTAC |
| | | | | ATGGAGCTGTCCCGGCTGAGATCTGACGACACCGCCGTGTACTACTGC |
| | | | | GCCAGGGACGGCAACTTCCCTTACTACGCCATGGACTCTTGGGGCCAG |
| | | | | GGCACCACGGTCACCGTCTCCTCAGGTGGTGGTGGTTCTGGCGGCGGC |
| | | | | GGCTCCGGTGGTGGTGGTTCTGACGTCGTGATGACTCAGTCTCCACTC |
| | | | | TCCCTGCCCGTCACCCTTGGAGAGCCGGCCTCCATCTCCTGCAGGTCT |
| | | | | AGTCAAAGCCTCGTATACAGTAACGGAAACACCTACTTGCATTGGTAT |
| | | | | CAACAGAAGCCAGGCCAATCTCCAAGACTCCTAATTTATAAGGTTTCT |
| | | | | AACCGGTTCTCTGGGGTCCCAGACAGATTCAGCGGCAGTGGGTCAGGC |
| | | | | ACTGATTTCACACTGAAAATCAGCAGGGTGGAGGCTGAGGATGTTGGG |
| | | | | GTTTATTTCTGCTCTCAAAGTACACATGTTCCGTACACGTTTGGCCAG |
| | | | | GGGACCAAGCTGGAGATCAAATCCGGAGGTGGTGGATCCGAGGTGCAG |
| | | | | CTGGTCGAGTCTGGAGGAGGATTGGTGCAGCCTGGAGGGTCATTGAAA |
| | | | | CTCTCATGTGCAGCCTCTGGATTCACCTTCAATAAGTACGCCATGAAC |
| | | | | TGGGTCCGCCAGGCTCCAGGAAAGGGTTTGGAATGGGTTGCTCGCATA |
| | | | | AGAAGTAAATATAATAATTATGCAACATATTATGCCGATTCAGTGAAA |
| | | | | GACAGGTTCACCATCTCCAGAGATGATTCAAAAAACACTGCCTATCTA |
| | | | | CAAATGAACAACTTGAAAACTGAGGACACTGCCGTGTACTACTGTGTG |
| | | | | AGACATGGGAACTTCGGTAATAGCTACATATCCTACTGGGCTTACTGG |
| | | | | GGCCAAGGGACTCTGGTCACCGTCTCCTCAGGTGGTGGTGGTTCTGGC |
| | | | | GGCGGCGGCTCCGGTGGTGGTGGTTCTCAGACTGTTGTGACTCAGGAA |
| | | | | CCTTCACTCACCGTATCACCTGGTGGAACAGTCACACTCACTTGTGGC |
| | | | | TCCTCGACTGGGGCTGTTACATCTGGCAACTACCCAAACTGGGTCCAA |
| | | | | CAAAAACCAGGTCAGGCACCCCGTGGTCTAATAGGTGGGACTAAGTTC |
| | | | | CTCGCCCCCGGTACTCCTGCCAGATTCTCAGGCTCCCTGCTTGGAGGC |
| | | | | AAGGCTGCCCTCACCCTCTCAGGGGTACAGCCAGAGGATGAGGCAGAA |
| | | | | TATTACTGTGTTCTATGGTACAGCAACCGCTGGGTGTTCGGTGGAGGA |
| | | | | ACCAAACTGACTGTCCTA |
| 253. | PM75A10-VH | artificial | aa | QVQLVQSGAEVKKPGASVKLSCKASGYTFTYFDINWVRQTPEQGLEWM |
| | | | | GGISPGDGNTNYNENFKGRVTMTRDTSSSTAYMELSRLRSDDTAVYYC |
| | | | | ARDGNFPYYAMVNWGQGTTVTVSS |
| 254. | PM75A10-HCDR1 | artificial | aa | YFDIN |
| 255. | PM75A10-HCDR2 | artificial | aa | GISPGDGNTNYNENFKG |
| 256. | PM75A10-HCDR3 | artificial | aa | DGNFPYYAMVN |
| 257. | PM75A10-VH | artificial | nt | CAGGTGCAGCTGGTCCAGTCTGGCGCCGAAGTGAAGAAGCCTGGCGCC |
| | | | | TCCGTGAAGCTGTCCTGCAAGGCCTCCGGCTACACCTTCACCTACTTC |
| | | | | GACATCAACTGGGTGCGGCAGACGCCTGAGCAGGGCCTGGAATGGATG |
| | | | | GGCGGCATCTCCCCTGGCGACGGCAACACCAACTACAACGAGAACTTC |
| | | | | AAGGGCAGGGTCACAATGACCAGAGACACGTCCTCATCCACCGCCTAC |
| | | | | ATGGAGCTGTCCCGGCTGAGATCTGACGACACCGCCGTGTACTACTGC |
| | | | | GCCAGGGACGGCAACTTCCCTTACTACGCGATGGTCAACTGGGGCCAG |
| | | | | GGCACCACGGTCACCGTCTCCTCA |
| 258. | PM75A10-VL | artificial | aa | DVVMTQSPLSLPVTLGEPASISCRSSQSLVYSNGNTYLHWYQQKPGQS |
| | | | | PRLLIYKVSNRFSGVPDRFSGSGSGTDFTLKISRVEAEDVGVYFCSQS |
| | | | | THVPYTFGQGTKLEIK |
| 259. | PM75A10-LCDR1 | artificial | aa | RSSQSLVYSNGNTYLH |
| 260. | PM75A10-LCDR2 | artificial | aa | KVSNRFS |
| 261. | PM75A10-LCDR3 | artificial | aa | SQSTHVPYT |
| 262. | PM75A10-VL | artificial | nt | GACGTCGTGATGACTCAGTCTCCACTCTCCCTGCCCGTCACCCTTGGA |
| | | | | GAGCCGGCCTCCATCTCCTGCAGGTCTAGTCAAAGCCTCGTATACAGT |
| | | | | AACGGAAACACCTACTTGCATTGGTATCAACAGAAGCCAGGCCAATCT |
| | | | | CCAAGACTCCTAATTTATAAGGTTTCTAACCGGTTCTCTGGGGTCCCA |
| | | | | GACAGATTCAGCGGCAGTGGGTCAGGCACTGATTTCACACTGAAAATC |
| | | | | AGCAGGGTGGAGGCTGAGGATGTTGGGGTTTATTTCTGTTCTCAAAGT |
| | | | | ACACATGTTCCGTACACGTTTGGCCAGGGGACCAAGCTGGAGATCAAA |
| 263. | PM75A10-VH-VL | artificial | aa | QVQLVQSGAEVKKPGASVKLSCKASGYTFTYFDINWVRQTPEQGLEWM |
| | | | | GGISPGDGNTNYNENFKGRVTMTRDTSSSTAYMELSRLRSDDTAVYYC |
| | | | | ARDGNFPYYAMVNWGQGTTVTVSSGGGGSGGGGSGGGGSDVVMTQSPL |
| | | | | SLPVTLGEPASISCRSSQSLVYSNGNTYLHWYQQKPGQSPRLLIYKVS |
| | | | | NRFSGVPDRFSGSGSGTDFTLKISRVEAEDVGVYFCSQSTHVPYTFGQ |
| | | | | GTKLEIK |
| 264. | PM75A10-VH-VL | artificial | nt | CAGGTGCAGCTGGTCCAGTCTGGCGCCGAAGTGAAGAAGCCTGGCGCC |
| | | | | TCCGTGAAGCTGTCCTGCAAGGCCTCCGGCTACACCTTCACCTACTTC |
| | | | | GACATCAACTGGGTGCGGCAGACGCCTGAGCAGGGCCTGGAATGGATG |
| | | | | GGCGGCATCTCCCCTGGCGACGGCAACACCAACTACAACGAGAACTTC |
| | | | | AAGGGCAGGGTCACAATGACCAGAGACACGTCCTCATCCACCGCCTAC |
| | | | | ATGGAGCTGTCCCGGCTGAGATCTGACGACACCGCCGTGTACTACTGC |
| | | | | GCCAGGGACGGCAACTTCCCTTACTACGCGATGGTCAACTGGGGCCAG |
| | | | | GGCACCACGGTCACCGTCTCCTCAGGTGGTGGTGGTTCTGGCGGCGGC |
| | | | | GGCTCCGGTGGTGGTGGTTCTGACGTCGTGATGACTCAGTCTCCACTC |
| | | | | TCCCTGCCCGTCACCCTTGGAGAGCCGGCCTCCATCTCCTGCAGGTCT |
| | | | | AGTCAAAGCCTCGTATACAGTAACGGAAACACCTACTTGCATTGGTAT |
| | | | | CAACAGAAGCCAGGCCAATCTCCAAGACTCCTAATTTATAAGGTTTCT |
| | | | | AACCGGTTCTCTGGGGTCCCAGACAGATTCAGCGGCAGTGGGTCAGGC |
| | | | | ACTGATTTCACACTGAAAATCAGCAGGGTGGAGGCTGAGGATGTTGGG |
| | | | | GTTTATTTCTGTTCTCAAAGTACACATGTTCCGTACACGTTTGGCCAG |
| | | | | GGGACCAAGCTGGAGATCAAA |
| 265. | PM75A10 VH-VL × I2C | artificial | aa | QVQLVQSGAEVKKPGASVKLSCKASGYTFTYFDINWVRQTPEQGLEWM |
| | VH-VL | | | GGISPGDGNTNYNENFKGRVTMTRDTSSSTAYMELSRLRSDDTAVYYC |
| | | | | ARDGNFPYYAMVNWGQGTTVTVSSGGGGSGGGGSGGGGSDVVMTQSPL |
| | | | | SLPVTLGEPASISCRSSQSLVYSNGNTYLHWYQQKPGQSPRLLIYKVS |
| | | | | NRFSGVPDRFSGSGSGTDFTLKISRVEAEDVGVYFCSQSTHVPYTFGQ |
| | | | | GTKLEIKSGGGGSEVQLVESGGGLVQPGGSLKLSCAASGFTFNKYAMN |
| | | | | WVRQAPGKGLEWVARIRSKYNNYATYYADSVKDRFTISRDDSKNTAYL |
| | | | | QMNNLKTEDTAVYYCVRHGNFGNSYISYWAYWGQGTLVTVSSGGGGSG |
| | | | | GGGSGGGGSQTVVTQEPSLTVSPGGTVTLTCGSSTGAVTSGNYPNWVQ |
| | | | | QKPGQAPRGLIGGTKFLAPGTPARFSGSLLGGKAALTLSGVQPEDEAE |
| | | | | YYCVLWYSNRWVFGGGTKLTVL |
| 266. | PM75A10 VH-VL × I2C | artificial | nt | CAGGTGCAGCTGGTCCAGTCTGGCGCCGAAGTGAAGAAGCCTGGCGCC |
| | VH-VL | | | TCCGTGAAGCTGTCCTGCAAGGCCTCCGGCTACACCTTCACCTACTTC |
| | | | | GACATCAACTGGGTGCGGCAGACGCCTGAGCAGGGCCTGGAATGGATG |
| | | | | GGCGGCATCTCCCCTGGCGACGGCAACACCAACTACAACGAGAACTTC |
| | | | | AAGGGCAGGGTCACAATGACCAGAGACACGTCCTCATCCACCGCCTAC |
| | | | | ATGGAGCTGTCCCGGCTGAGATCTGACGACACCGCCGTGTACTACTGC |
| | | | | GCCAGGGACGGCAACTTCCCTTACTACGCGATGGTCAACTGGGGCCAG |
| | | | | GGCACCACGGTCACCGTCTCCTCAGGTGGTGGTGGTTCTGGCGGCGGC |
| | | | | GGCTCCGGTGGTGGTGGTTCTGACGTCGTGATGACTCAGTCTCCACTC |
| | | | | TCCCTGCCCGTCACCCTTGGAGAGCCGGCCTCCATCTCCTGCAGGTCT |
| | | | | AGTCAAAGCCTCGTATACAGTAACGGAAACACCTACTTGCATTGGTAT |
| | | | | CAACAGAAGCCAGGCCAATCTCCAAGACTCCTAATTTATAAGGTTTCT |
| | | | | AACCGGTTCTCTGGGGTCCCAGACAGATTCAGCGGCAGTGGGTCAGGC |
| | | | | ACTGATTTCACACTGAAAATCAGCAGGGTGGAGGCTGAGGATGTTGGG |
| | | | | GTTTATTTCTGTTCTCAAAGTACACATGTTCCGTACACGTTTGGCCAG |
| | | | | GGGACCAAGCTGGAGATCAAATCCGGAGGTGGTGGATCCGAGGTGCAG |
| | | | | CTGGTCGAGTCTGGAGGAGGATTGGTGCAGCCTGGAGGGTCATTGAAA |
| | | | | CTCTCATGTGCAGCCTCTGGATTCACCTTCAATAAGTACGCCATGAAC |
| | | | | TGGGTCCGCCAGGCTCCAGGAAAGGGTTTGGAATGGGTTGCTCGCATA |
| | | | | AGAAGTAAATATAATAATTATGCAACATATTATGCCGATTCAGTGAAA |
| | | | | GACAGGTTCACCATCTCCAGAGATGATTCAAAAAACACTGCCTATCTA |
| | | | | CAAATGAACAACTTGAAAACTGAGGACACTGCCGTGTACTACTGTGTG |
| | | | | AGACATGGGAACTTCGGTAATAGCTACATATCCTACTGGGCTTACTGG |
| | | | | GGCCAAGGGACTCTGGTCACCGTCTCCTCAGGTGGTGGTGGTTCTGGC |
| | | | | GGCGGCGGCTCCGGTGGTGGTGGTTCTCAGACTGTTGTGACTCAGGAA |
| | | | | CCTTCACTCACCGTATCACCTGGTGGAACAGTCACACTCACTTGTGGC |
| | | | | TCCTCGACTGGGGCTGTTACATCTGGCAACTACCCAAACTGGGTCCAA |
| | | | | CAAAAACCAGGTCAGGCACCCCGTGGTCTAATAGGTGGGACTAAGTTC |
| | | | | CTCGCCCCCGGTACTCCTGCCAGATTCTCAGGCTCCCTGCTTGGAGGC |
| | | | | AAGGCTGCCCTCACCCTCTCAGGGGTACAGCCAGAGGATGAGGCAGAA |
| | | | | TATTACTGTGTTCTATGGTACAGCAACCGCTGGGTGTTCGGTGGAGGA |
| | | | | ACCAAACTGACTGTCCTA |
| 267. | PM91B6-VH | artificial | aa | QVQLVQSGAEVKKPGASVKLSCKASGYTFTYFDINWVRQTPEQGLEWM |
| | | | | GGISPGDGNTNYNENFKGRVTMTRDTSSSTAYMELSRLRSDDTAVYYC |
| | | | | ARDGNFPYYALTNWGQGTTVTVSS |
| 268. | PM91B6-HCDR1 | artificial | aa | YFDIN |
| 269. | PM91B6-HCDR2 | artificial | aa | GISPGDGNTNYNENFKG |
| 270. | PM91B6-HCDR3 | artificial | aa | DGNFPYYALTN |
| 271. | PM91B6-VH | artificial | nt | CAGGTGCAGCTGGTCCAGTCTGGCGCCGAAGTGAAGAAGCCTGGCGCC |
| | | | | TCCGTGAAGCTGTCCTGCAAGGCCTCCGGCTACACCTTCACCTACTTC |
| | | | | GACATCAACTGGGTGCGGCAGACGCCTGAGCAGGGCCTGGAATGGATG |
| | | | | GGCGGCATCTCCCCTGGCGACGGCAACACCAACTACAACGAGAACTTC |
| | | | | AAGGGCAGGGTCACAATGACCAGAGACACGTCCTCATCCACCGCCTAC |
| | | | | ATGGAGCTGTCCCGGCTGAGATCTGACGACACCGCCGTGTACTACTGC |
| | | | | GCCAGGGACGGCAACTTCCCTTACTACGCCCTGACCAACTGGGGCCAG |
| | | | | GGCACCACGGTCACCGTCTCCTCA |
| 272. | PM91B6-VL | artificial | aa | DVVMTQSPLSLPVTLGEPASISCRSSQSLVYSNGNTYLHWYQQKPGQS |
| | | | | PRLLIYKVSNRFSGVPDRFSGSGSGTDFTLKISRVEAEDVGVYFCSQS |
| | | | | THVPYTFGQGTKLEIK |
| 273. | PM91B6-LCDR1 | artificial | aa | RSSQSLVYSNGNTYLH |
| 274. | PM91B6-LCDR2 | artificial | aa | KVSNRFS |
| 275. | PM91B6-LCDR3 | artificial | aa | SQSTHVPYT |
| 276. | PM91B6-VL | artificial | nt | GACGTCGTGATGACTCAGTCTCCACTCTCCCTGCCCGTCACCCTTGGA |
| | | | | GAGCCGGCCTCCATCTCCTGCAGGTCTAGTCAAAGCCTCGTATACAGT |
| | | | | AACGGAAACACCTACTTGCATTGGTATCAACAGAAGCCAGGCCAATCT |
| | | | | CCAAGACTCCTAATTTATAAGGTTTCTAACCGGTTCTCTGGGGTCCCA |
| | | | | GACAGATTCAGCGGCAGTGGGTCAGGCACTGATTTCACACTGAAAATC |
| | | | | AGCAGGGTGGAGGCTGAGGATGTTGGGGTTTATTTCTGTTCTCAAAGT |
| | | | | ACACATGTTCCGTACACGTTTGGCCAGGGGACCAAGCTGGAGATCAAA |
| 277. | PM91B6-VH-VL | artificial | aa | QVQLVQSGAEVKKPGASVKLSCKASGYTFTYFDINWVRQTPEQGLEWM |
| | | | | GGISPGDGNTNYNENFKGRVTMTRDTSSSTAYMELSRLRSDDTAVYYC |
| | | | | ARDGNFPYYALTNWGQGTTVTVSSGGGGSGGGGSGGGGSDVVMTQSPL |
| | | | | SLPVTLGEPASISCRSSQSLVYSNGNTYLHWYQQKPGQSPRLLIYKVS |
| | | | | NRFSGVPDRFSGSGSGTDFTLKISRVEAEDVGVYFCSQSTHVPYTFGQ |
| | | | | GTKLEIK |
| 278. | PM91B6-VH-VL | artificial | nt | CAGGTGCAGCTGGTCCAGTCTGGCGCCGAAGTGAAGAAGCCTGGCGCC |
| | | | | TCCGTGAAGCTGTCCTGCAAGGCCTCCGGCTACACCTTCACCTACTTC |
| | | | | GACATCAACTGGGTGCGGCAGACGCCTGAGCAGGGCCTGGAATGGATG |
| | | | | GGCGGCATCTCCCCTGGCGACGGCAACACCAACTACAACGAGAACTTC |
| | | | | AAGGGCAGGGTCACAATGACCAGAGACACGTCCTCATCCACCGCCTAC |
| | | | | ATGGAGCTGTCCCGGCTGAGATCTGACGACACCGCCGTGTACTACTGC |
| | | | | GCCAGGGACGGCAACTTCCCTTACTACGCCCTGACCAACTGGGGCCAG |
| | | | | GGCACCACGGTCACCGTCTCCTCAGGTGGTGGTGGTTCTGGCGGCGGC |
| | | | | GGCTCCGGTGGTGGTGGTTCTGACGTCGTGATGACTCAGTCTCCACTC |
| | | | | TCCCTGCCCGTCACCCTTGGAGAGCCGGCCTCCATCTCCTGCAGGTCT |
| | | | | AGTCAAAGCCTCGTATACAGTAACGGAAACACCTACTTGCATTGGTAT |
| | | | | CAACAGAAGCCAGGCCAATCTCCAAGACTCCTAATTTATAAGGTTTCT |
| | | | | AACCGGTTCTCTGGGGTCCCAGACAGATTCAGCGGCAGTGGGTCAGGC |
| | | | | ACTGATTTCACACTGAAAATCAGCAGGGTGGAGGCTGAGGATGTTGGG |
| | | | | GTTTATTTCTGTTCTCAAAGTACACATGTTCCGTACACGTTTGGCCAG |
| | | | | GGGACCAAGCTGGAGATCAAA |
| 279. | PM91B6 VH-VL × I2C | artificial | aa | QVQLVQSGAEVKKPGASVKLSCKASGYTFTYFDINWVRQTPEQGLEWM |
| | VH-VL | | | GGISPGDGNTNYNENFKGRVTMTRDTSSSTAYMELSRLRSDDTAVYYC |
| | | | | ARDGNFPYYALTNWGQGTTVTVSSGGGGSGGGGSGGGGSDVVMTQSPL |
| | | | | SLPVTLGEPASISCRSSQSLVYSNGNTYLHWYQQKPGQSPRLLIYKVS |
| | | | | NRFSGVPDRFSGSGSGTDFTLKISRVEAEDVGVYFCSQSTHVPYTFGQ |
| | | | | GTKLEIKSGGGGSEVQLVESGGGLVQPGGSLKLSCAASGFTFNKYAMN |
| | | | | WVRQAPGKGLEWVARIRSKYNNYATYYADSVKDRFTISRDDSKNTAYL |
| | | | | QMNNLKTEDTAVYYCVRHGNFGNSYISYWAYWGQGTLVTVSSGGGGSG |
| | | | | GGGSGGGGSQTVVTQEPSLTVSPGGTVTLTCGSSTGAVTSGNYPNWVQ |
| | | | | QKPGQAPRGLIGGTKFLAPGTPARFSGSLLGGKAALTLSGVQPEDEAE |
| | | | | YYCVLWYSNRWVFGGGTKLTVL |
| 280. | PM91B6 VH-VL × I2C | artificial | nt | CAGGTGCAGCTGGTCCAGTCTGGCGCCGAAGTGAAGAAGCCTGGCGCC |
| | VH-VL | | | TCCGTGAAGCTGTCCTGCAAGGCCTCCGGCTACACCTTCACCTACTTC |
| | | | | GACATCAACTGGGTGCGGCAGACGCCTGAGCAGGGCCTGGAATGGATG |
| | | | | GGCGGCATCTCCCCTGGCGACGGCAACACCAACTACAACGAGAACTTC |
| | | | | AAGGGCAGGGTCACAATGACCAGAGACACGTCCTCATCCACCGCCTAC |
| | | | | ATGGAGCTGTCCCGGCTGAGATCTGACGACACCGCCGTGTACTACTGC |
| | | | | GCCAGGGACGGCAACTTCCCTTACTACGCCCTGACCAACTGGGGCCAG |
| | | | | GGCACCACGGTCACCGTCTCCTCAGGTGGTGGTGGTTCTGGCGGCGGC |
| | | | | GGCTCCGGTGGTGGTGGTTCTGACGTCGTGATGACTCAGTCTCCACTC |
| | | | | TCCCTGCCCGTCACCCTTGGAGAGCCGGCCTCCATCTCCTGCAGGTCT |
| | | | | AGTCAAAGCCTCGTATACAGTAACGGAAACACCTACTTGCATTGGTAT |
| | | | | CAACAGAAGCCAGGCCAATCTCCAAGACTCCTAATTTATAAGGTTTCT |
| | | | | AACCGGTTCTCTGGGGTCCCAGACAGATTCAGCGGCAGTGGGTCAGGC |
| | | | | ACTGATTTCACACTGAAAATCAGCAGGGTGGAGGCTGAGGATGTTGGG |
| | | | | GTTTATTTCTGTTCTCAAAGTACACATGTTCCGTACACGTTTGGCCAG |
| | | | | GGGACCAAGCTGGAGATCAAATCCGGAGGTGGTGGATCCGAGGTGCAG |
| | | | | CTGGTCGAGTCTGGAGGAGGATTGGTGCAGCCTGGAGGGTCATTGAAA |
| | | | | CTCTCATGTGCAGCCTCTGGATTCACCTTCAATAAGTACGCCATGAAC |
| | | | | TGGGTCCGCCAGGCTCCAGGAAAGGGTTTGGAATGGGTTGCTCGCATA |
| | | | | AGAAGTAAATATAATAATTATGCAACATATTATGCCGATTCAGTGAAA |
| | | | | GACAGGTTCACCATCTCCAGAGATGATTCAAAAAACACTGCCTATCTA |
| | | | | CAAATGAACAACTTGAAAACTGAGGACACTGCCGTGTACTACTGTGTG |
| | | | | AGACATGGGAACTTCGGTAATAGCTACATATCCTACTGGGCTTACTGG |
| | | | | GGCCAAGGGACTCTGGTCACCGTCTCCTCAGGTGGTGGTGGTTCTGGC |
| | | | | GGCGGCGGCTCCGGTGGTGGTGGTTCTCAGACTGTTGTGACTCAGGAA |
| | | | | CCTTCACTCACCGTATCACCTGGTGGAACAGTCACACTCACTTGTGGC |
| | | | | TCCTCGACTGGGGCTGTTACATCTGGCAACTACCCAAACTGGGTCCAA |
| | | | | CAAAAACCAGGTCAGGCACCCCGTGGTCTAATAGGTGGGACTAAGTTC |
| | | | | CTCGCCCCCGGTACTCCTGCCAGATTCTCAGGCTCCCTGCTTGGAGGC |
| | | | | AAGGCTGCCCTCACCCTCTCAGGGGTACAGCCAGAGGATGAGGCAGAA |
| | | | | TATTACTGTGTTCTATGGTACAGCAACCGCTGGGTGTTCGGTGGAGGA |
| | | | | ACCAAACTGACTGTCCTA |
| 281. | PM83A12-VH | artificial | aa | QVQLVESGGGLVKPGESLRLSCAASGFTFSDYYMYWVRQAPGKGLEWV |
| | | | | AIISDGGYYTYYSDIIKGRFTISRDNAKNSLYLQTNSLKAEDTAVYYC |
| | | | | ARGFPLLRHGAFDLWGQGTLVTVSS |
| 282. | PM83A12-HCDR1 | artificial | aa | DYYMY |
| 283. | PM83A12-HCDR2 | artificial | aa | IISDGGYYTYYSDIIKG |
| 284. | PM83A12-HCDR3 | artificial | aa | GFPLLRHGAFDL |
| 285. | PM83A12-VH | artificial | nt | CAGGTGCAGCTGGTCGAGTCTGGCGGCGGACTGGTGAAGCCTGGCGAG |
| | | | | TCCCTGAGGCTGTCCTGTGCCGCCTCCGGCTTCACCTTCTCCGACTAC |
| | | | | TACATGTACTGGGTCCGCCAGGCCCCTGGGAAGGGGCTGGAATGGGTG |
| | | | | GCCATCATCTCCGACGGCGGCTACTACACCTACTACTCCGACATCATC |
| | | | | AAGGGCCGGTTCACCATCTCCCGGGACAATGCCAAGAACAGCCTGTAC |
| | | | | CTGCAGACGAACTCCCTGAAGGCCGAGGACACCGCCGTGTACTACTGC |
| | | | | GCCCGGGGCTTCCCTCTGCTGAGACACGGCGCCTTCGACCTCTGGGGC |
| | | | | CAGGGCACCCTGGTCACCGTCTCCTCA |
| 286. | PM83A12-VL | artificial | aa | DIQMTQSPSSLSASVGDRVTITCKASQNVDTNVAWYQQKPGQAPKSLI |
| | | | | YSASYRYSDVPSRFSGSASGTDFTLTISSVQSEDFATYYCQQYDSYPY |
| | | | | TFGGGTKLEIK |
| 287. | PM83A12-LCDR1 | artificial | aa | KASQNVDTNVA |
| 288. | PM83A12-LCDR2 | artificial | aa | SASYRYS |
| 289. | PM83A12-LCDR3 | artificial | aa | QQYDSYPYT |
| 290. | PM83A12-VL | artificial | nt | GACATCCAGATGACCCAGTCCCCCAGCTCCCTGTCCGCCTCCGTGGGC |
| | | | | GACAGAGTGACCATCACCTGCAAGGCCTCCCAGAACGTGGACACCAAC |
| | | | | GTGGCCTGGTATCAGCAGAAGCCCGGCCAGGCCCCTAAGTCCCTGATC |
| | | | | TACTCCGCCTCCTACCGGTACTCTGACGTGCCTTCCCGGTTCTCCGGC |
| | | | | TCCGCGTCCGGCACCGACTTCACCCTGACCATCTCCAGCGTGCAGTCT |
| | | | | GAGGACTTCGCCACGTACTACTGCCAGCAGTACGACTCCTACCCTTAC |
| | | | | ACCTTCGGCGGAGGGACCAAGCTGGAAATCAAG |
| 291. | PM83A12-VH-VL | artificial | aa | QVQLVESGGGLVKPGESLRLSCAASGFTFSDYYMYWVRQAPGKGLEWV |
| | | | | AIISDGGYYTYYSDIIKGRFTISRDNAKNSLYLQTNSLKAEDTAVYYC |
| | | | | ARGFPLLRHGAFDLWGQGTLVTVSSGGGGSGGGGSGGGGSDIQMTQSP |
| | | | | SSLSASVGDRVTITCKASQNVDTNVAWYQQKPGQAPKSLIYSASYRYS |
| | | | | DVPSRFSGSASGTDFTLTISSVQSEDFATYYCQQYDSYPYTFGGGTKL |
| | | | | EIK |
| 292. | PM83A12-VH-VL | artificial | nt | CAGGTGCAGCTGGTCGAGTCTGGCGGCGGACTGGTGAAGCCTGGCGAG |
| | | | | TCCCTGAGGCTGTCCTGTGCCGCCTCCGGCTTCACCTTCTCCGACTAC |
| | | | | TACATGTACTGGGTCCGCCAGGCCCCTGGGAAGGGGCTGGAATGGGTG |
| | | | | GCCATCATCTCCGACGGCGGCTACTACACCTACTACTCCGACATCATC |
| | | | | AAGGGCCGGTTCACCATCTCCCGGGACAATGCCAAGAACAGCCTGTAC |
| | | | | CTGCAGACGAACTCCCTGAAGGCCGAGGACACCGCCGTGTACTACTGC |
| | | | | GCCCGGGGCTTCCCTCTGCTGAGACACGGCGCCTTCGACCTCTGGGGC |
| | | | | CAGGGCACCCTGGTCACCGTCTCCTCAGGTGGTGGTGGTTCTGGCGGC |
| | | | | GGCGGCTCCGGTGGTGGTGGTTCTGACATCCAGATGACCCAGTCCCCC |
| | | | | AGCTCCCTGTCCGCCTCCGTGGGCGACAGAGTGACCATCACCTGCAAG |
| | | | | GCCTCCCAGAACGTGGACACCAACGTGGCCTGGTATCAGCAGAAGCCC |
| | | | | GGCCAGGCCCCTAAGTCCCTGATCTACTCCGCCTCCTACCGGTACTCT |
| | | | | GACGTGCCTTCCCGGTTCTCCGGCTCCGCGTCCGGCACCGACTTCACC |
| | | | | CTGACCATCTCCAGCGTGCAGTCTGAGGACTTCGCCACGTACTACTGC |
| | | | | CAGCAGTACGACTCCTACCCTTACACCTTCGGCGGAGGGACCAAGCTG |
| | | | | GAAATCAAG |
| 293. | PM83A12 VH-VL × I2C | artificial | aa | QVQLVESGGGLVKPGESLRLSCAASGFTFSDYYMYWVRQAPGKGLEWV |
| | VH-VL | | | AIISDGGYYTYYSDIIKGRFTISRDNAKNSLYLQTNSLKAEDTAVYYC |
| | | | | ARGFPLLRHGAFDLWGQGTLVTVSSGGGGSGGGGSGGGGSDIQMTQSP |
| | | | | SSLSASVGDRVTITCKASQNVDTNVAWYQQKPGQAPKSLIYSASYRYS |
| | | | | DVPSRFSGSASGTDFTLTISSVQSEDFATYYCQQYDSYPYTFGGGTKL |
| | | | | EIKSGGGGSEVQLVESGGGLVQPGGSLKLSCAASGFTFNKYAMNWVRQ |
| | | | | APGKGLEWVARIRSKYNNYATYYADSVKDRFTISRDDSKNTAYLQMNN |
| | | | | LKTEDTAVYYCVRHGNFGNSYISYWAYWGQGTLVTVSSGGGGSGGGGS |
| | | | | GGGGSQTVVTQEPSLTVSPGGTVTLTCGSSTGAVTSGNYPNWVQQKPG |
| | | | | QAPRGLIGGTKFLAPGTPARFSGSLLGGKAALTLSGVQPEDEAEYYCV |
| | | | | LWYSNRWVFGGGTKLTVL |
| 294. | PM83A12 VH-VL × I2C | artificial | nt | CAGGTGCAGCTGGTCGAGTCTGGCGGCGGACTGGTGAAGCCTGGCGAG |
| | VH-VL | | | TCCCTGAGGCTGTCCTGTGCCGCCTCCGGCTTCACCTTCTCCGACTAC |
| | | | | TACATGTACTGGGTCCGCCAGGCCCCTGGGAAGGGGCTGGAATGGGTG |
| | | | | GCCATCATCTCCGACGGCGGCTACTACACCTACTACTCCGACATCATC |
| | | | | AAGGGCCGGTTCACCATCTCCCGGGACAATGCCAAGAACAGCCTGTAC |
| | | | | CTGCAGACGAACTCCCTGAAGGCCGAGGACACCGCCGTGTACTACTGC |
| | | | | GCCCGGGGCTTCCCTCTGCTGAGACACGGCGCCTTCGACCTCTGGGGC |
| | | | | CAGGGCACCCTGGTCACCGTCTCCTCAGGTGGTGGTGGTTCTGGCGGC |
| | | | | GGCGGCTCCGGTGGTGGTGGTTCTGACATCCAGATGACCCAGTCCCCC |
| | | | | AGCTCCCTGTCCGCCTCCGTGGGCGACAGAGTGACCATCACCTGCAAG |
| | | | | GCCTCCCAGAACGTGGACACCAACGTGGCCTGGTATCAGCAGAAGCCC |
| | | | | GGCCAGGCCCCTAAGTCCCTGATCTACTCCGCCTCCTACCGGTACTCT |
| | | | | GACGTGCCTTCCCGGTTCTCCGGCTCCGCGTCCGGCACCGACTTCACC |
| | | | | CTGACCATCTCCAGCGTGCAGTCTGAGGACTTCGCCACGTACTACTGC |
| | | | | CAGCAGTACGACTCCTACCCTTACACCTTCGGCGGAGGGACCAAGCTG |
| | | | | GAAATCAAGTCCGGAGGTGGTGGATCCGAGGTGCAGCTGGTCGAGTCT |
| | | | | GGAGGAGGATTGGTGCAGCCTGGAGGGTCATTGAAACTCTCATGTGCA |
| | | | | GCCTCTGGATTCACCTTCAATAAGTACGCCATGAACTGGGTCCGCCAG |
| | | | | GCTCCAGGAAAGGGTTTGGAATGGGTTGCTCGCATAAGAAGTAAATAT |
| | | | | AATAATTATGCAACATATTATGCCGATTCAGTGAAAGACAGGTTCACC |
| | | | | ATCTCCAGAGATGATTCAAAAAACACTGCCTATCTACAAATGAACAAC |
| | | | | TTGAAAACTGAGGACACTGCCGTGTACTACTGTGTGAGACATGGGAAC |
| | | | | TTCGGTAATAGCTACATATCCTACTGGGCTTACTGGGGCCAAGGGACT |
| | | | | CTGGTCACCGTCTCCTCAGGTGGTGGTGGTTCTGGCGGCGGCGGCTCC |
| | | | | GGTGGTGGTGGTTCTCAGACTGTTGTGACTCAGGAACCTTCACTCACC |
| | | | | GTATCACCTGGTGGAACAGTCACACTCACTTGTGGCTCCTCGACTGGG |
| | | | | GCTGTTACATCTGGCAACTACCCAAACTGGGTCCAACAAAAACCAGGT |
| | | | | CAGGCACCCCGTGGTCTAATAGGTGGGACTAAGTTCCTCGCCCCCGGT |
| | | | | ACTCCTGCCAGATTCTCAGGCTCCCTGCTTGGAGGCAAGGCTGCCCTC |
| | | | | ACCCTCTCAGGGGTACAGCCAGAGGATGAGGCAGAATATTACTGTGTT |
| | | | | CTATGGTACAGCAACCGCTGGGTGTTCGGTGGAGGAACCAAACTGACT |
| | | | | GTCCTA |
| 295. | PM07F8MPF-VH | artificial | aa | QVQLVESGGGLVKPGESLRLSCAASGFTFSDYYMYWVRQAPGKGLEWV |
| | | | | ASISDGGSNTYYSDIIKGRFTISRDNAKNSLYLQTNSLKAEDTAVYYC |
| | | | | ARGFPLLRHGAFDLWGQGTLVTVSS |
| 296. | PM07F8MPF-HCDR1 | artificial | aa | DYYMY |
| 297. | PM07F8MPF-HCDR2 | artificial | aa | SISDGGSNTYYSDIIKG |
| 298. | PM07F8MPF-HCDR3 | artificial | aa | GFPLLRHGAFDL |
| 299. | PM07F8MPF-VH | artificial | nt | CAGGTGCAGCTGGTCGAGTCTGGCGGCGGACTGGTGAAGCCTGGCGAG |
| | | | | TCCCTGAGGCTGTCCTGTGCCGCCTCCGGCTTCACCTTCTCCGACTAC |
| | | | | TACATGTACTGGGTCCGCCAGGCCCCTGGGAAGGGACTGGAATGGGTG |
| | | | | GCCTCCATCTCCGACGGCGGCTCCAACACCTACTACTCCGACATCATC |
| | | | | AAGGGCCGGTTCACCATCTCCCGGGACAACGCCAAGAACAGCCTGTAC |
| | | | | CTGCAGACGAACTCCCTGAAGGCCGAGGACACCGCCGTGTACTACTGC |
| | | | | GCCCGGGGCTTCCCTCTGCTGAGACACGGCGCCTTCGACCTCTGGGGC |
| | | | | CAGGGCACCCTGGTCACCGTCTCCTCA |
| 300. | PM07F8MPF-VL | artificial | aa | DIQMTQSPSSLSASVGDRVTITCRASQNVDTNVAWYQQKPGQAPKSLI |
| | | | | YSATYRYSDVPSRFSGSASGTDFTLTISSVQSEDFATYYCQQYNSYPY |
| | | | | TFGGGTKLEIK |
| 301. | PM07F8MPF-LCDR1 | artificial | aa | RASQNVDTNVA |
| 302. | PM07F8MPF-LCDR2 | artificial | aa | SATYRYS |
| 303. | PM07F8MPF-LCDR3 | artificial | aa | QQYNSYPYT |
| 304. | PM07F8MPF-VL | artificial | nt | GACATCCAGATGACCCAGTCCCCCAGCTCCCTGTCCGCCTCCGTGGGC |
| | | | | GACAGAGTGACCATCACCTGCAGGGCCTCCCAGAACGTGGACACCAAC |
| | | | | GTGGCCTGGTATCAGCAGAAGCCCGGCCAGGCCCCTAAGTCCCTGATC |
| | | | | TACTCCGCCACCTACCGGTACTCTGACGTGCCTTCCCGGTTCTCCGGC |
| | | | | TCCGCGTCCGGCACCGACTTCACCCTGACCATCTCCAGCGTGCAGTCT |
| | | | | GAGGACTTCGCCACGTACTACTGCCAGCAGTACAACTCCTACCCTTAC |
| | | | | ACCTTCGGCGGAGGGACCAAGCTGGAAATCAAG |
| 305. | PM07F8MPF-VH-VL | artificial | aa | QVQLVESGGGLVKPGESLRLSCAASGFTFSDYYMYWVRQAPGKGLEWV |
| | | | | ASISDGGSNTYYSDIIKGRFTISRDNAKNSLYLQTNSLKAEDTAVYYC |
| | | | | ARGFPLLRHGAFDLWGQGTLVTVSSGGGGSGGGGSGGGGSDIQMTQSP |
| | | | | SSLSASVGDRVTITCRASQNVDTNVAWYQQKPGQAPKSLIYSATYRYS |
| | | | | DVPSRFSGSASGTDFTLTISSVQSEDFATYYCQQYNSYPYTFGGGTKL |
| | | | | EIK |
| 306. | PM07F8MPF-VH-VL | artificial | nt | CAGGTGCAGCTGGTCGAGTCTGGCGGCGGACTGGTGAAGCCTGGCGAG |
| | | | | TCCCTGAGGCTGTCCTGTGCCGCCTCCGGCTTCACCTTCTCCGACTAC |
| | | | | TACATGTACTGGGTCCGCCAGGCCCCTGGGAAGGGACTGGAATGGGTG |
| | | | | GCCTCCATCTCCGACGGCGGCTCCAACACCTACTACTCCGACATCATC |
| | | | | AAGGGCCGGTTCACCATCTCCCGGGACAACGCCAAGAACAGCCTGTAC |
| | | | | CTGCAGACGAACTCCCTGAAGGCCGAGGACACCGCCGTGTACTACTGC |
| | | | | GCCCGGGGCTTCCCTCTGCTGAGACACGGCGCCTTCGACCTCTGGGGC |
| | | | | CAGGGCACCCTGGTCACCGTCTCCTCAGGTGGTGGTGGTTCTGGCGGC |
| | | | | GGCGGCTCCGGTGGTGGTGGTTCTGACATCCAGATGACCCAGTCCCCC |
| | | | | AGCTCCCTGTCCGCCTCCGTGGGCGACAGAGTGACCATCACCTGCAGG |
| | | | | GCCTCCCAGAACGTGGACACCAACGTGGCCTGGTATCAGCAGAAGCCC |
| | | | | GGCCAGGCCCCTAAGTCCCTGATCTACTCCGCCACCTACCGGTACTCT |
| | | | | GACGTGCCTTCCCGGTTCTCCGGCTCCGCGTCCGGCACCGACTTCACC |
| | | | | CTGACCATCTCCAGCGTGCAGTCTGAGGACTTCGCCACGTACTACTGC |
| | | | | CAGCAGTACAACTCCTACCCTTACACCTTCGGCGGAGGGACCAAGCTG |
| | | | | GAAATCAAG |
| 307. | PM07F8MPF VH-VL × I2C | artificial | aa | QVQLVESGGGLVKPGESLRLSCAASGFTFSDYYMYWVRQAPGKGLEWV |
| | VH-VL | | | ASISDGGSNTYYSDIIKGRFTISRDNAKNSLYLQTNSLKAEDTAVYYC |
| | | | | ARGFPLLRHGAFDLWGQGTLVTVSSGGGGSGGGGSGGGGSDIQMTQSP |
| | | | | SSLSASVGDRVTITCRASQNVDTNVAWYQQKPGQAPKSLIYSATYRYS |
| | | | | DVPSRFSGSASGTDFTLTISSVQSEDFATYYCQQYNSYPYTFGGGTKL |
| | | | | EIKSGGGGSEVQLVESGGGLVQPGGSLKLSCAASGFTFNKYAMNWVRQ |
| | | | | APGKGLEWVARIRSKYNNYATYYADSVKDRFTISRDDSKNTAYLQMNN |
| | | | | LKTEDTAVYYCVRHGNFGNSYISYWAYWGQGTLVTVSSGGGGSGGGGS |
| | | | | GGGGSQTVVTQEPSLTVSPGGTVTLTCGSSTGAVTSGNYPNWVQQKPG |
| | | | | QAPRGLIGGTKFLAPGTPARFSGSLLGGKAALTLSGVQPEDEAEYYCV |
| | | | | LWYSNRWVFGGGTKLTVL |
| 308. | PM07F8MPF VH-VL × I2C | artificial | nt | CAGGTGCAGCTGGTCGAGTCTGGCGGCGGACTGGTGAAGCCTGGCGAG |
| | VH-VL | | | TCCCTGAGGCTGTCCTGTGCCGCCTCCGGCTTCACCTTCTCCGACTAC |
| | | | | TACATGTACTGGGTCCGCCAGGCCCCTGGGAAGGGACTGGAATGGGTG |
| | | | | GCCTCCATCTCCGACGGCGGCTCCAACACCTACTACTCCGACATCATC |
| | | | | AAGGGCCGGTTCACCATCTCCCGGGACAACGCCAAGAACAGCCTGTAC |
| | | | | CTGCAGACGAACTCCCTGAAGGCCGAGGACACCGCCGTGTACTACTGC |
| | | | | GCCCGGGGCTTCCCTCTGCTGAGACACGGCGCCTTCGACCTCTGGGGC |
| | | | | CAGGGCACCCTGGTCACCGTCTCCTCAGGTGGTGGTGGTTCTGGCGGC |
| | | | | GGCGGCTCCGGTGGTGGTGGTTCTGACATCCAGATGACCCAGTCCCCC |
| | | | | AGCTCCCTGTCCGCCTCCGTGGGCGACAGAGTGACCATCACCTGCAGG |
| | | | | GCCTCCCAGAACGTGGACACCAACGTGGCCTGGTATCAGCAGAAGCCC |
| | | | | GGCCAGGCCCCTAAGTCCCTGATCTACTCCGCCACCTACCGGTACTCT |
| | | | | GACGTGCCTTCCCGGTTCTCCGGCTCCGCGTCCGGCACCGACTTCACC |
| | | | | CTGACCATCTCCAGCGTGCAGTCTGAGGACTTCGCCACGTACTACTGC |
| | | | | CAGCAGTACAACTCCTACCCTTACACCTTCGGCGGAGGGACCAAGCTG |
| | | | | GAAATCAAGTCCGGAGGTGGTGGATCCGAGGTGCAGCTGGTCGAGTCT |
| | | | | GGAGGAGGATTGGTGCAGCCTGGAGGGTCATTGAAACTCTCATGTGCA |
| | | | | GCCTCTGGATTCACCTTCAATAAGTACGCCATGAACTGGGTCCGCCAG |
| | | | | GCTCCAGGAAAGGGTTTGGAATGGGTTGCTCGCATAAGAAGTAAATAT |
| | | | | AATAATTATGCAACATATTATGCCGATTCAGTGAAAGACAGGTTCACC |
| | | | | ATCTCCAGAGATGATTCAAAAAACACTGCCTATCTACAAATGAACAAC |
| | | | | TTGAAAACTGAGGACACTGCCGTGTACTACTGTGTGAGACATGGGAAC |
| | | | | TTCGGTAATAGCTACATATCCTACTGGGCTTACTGGGGCCAAGGGACT |
| | | | | CTGGTCACCGTCTCCTCAGGTGGTGGTGGTTCTGGCGGCGGCGGCTCC |
| | | | | GGTGGTGGTGGTTCTCAGACTGTTGTGACTCAGGAACCTTCACTCACC |
| | | | | GTATCACCTGGTGGAACAGTCACACTCACTTGTGGCTCCTCGACTGGG |
| | | | | GCTGTTACATCTGGCAACTACCCAAACTGGGTCCAACAAAAACCAGGT |
| | | | | CAGGCACCCCGTGGTCTAATAGGTGGGACTAAGTTCCTCGCCCCCGGT |
| | | | | ACTCCTGCCAGATTCTCAGGCTCCCTGCTTGGAGGCAAGGCTGCCCTC |
| | | | | ACCCTCTCAGGGGTACAGCCAGAGGATGAGGCAGAATATTACTGTGTT |
| | | | | CTATGGTACAGCAACCGCTGGGTGTTCGGTGGAGGAACCAAACTGACT |
| | | | | GTCCTA |
| 309. | PM07F8L1-VH | artificial | aa | QVQLVESGGGLVKPGESLRLSCAASGFTFSDYYMYWVRQAPGKGLEWV |
| | | | | ASISDGGSNTYYSDIIKGRFTISRDNAKNSLYLQMNSLKAEDTAVYYC |
| | | | | ARGFPLLRHGAFDYWGQGTLVTVSS |
| 310. | PM07F8L1-HCDR1 | artificial | aa | DYYMS |
| 311. | PM07F8L1-HCDR2 | artificial | aa | SISDGGSNTYYSDIIKG |
| 312. | PM07F8L1-HCDR3 | artificial | aa | GFPLLRHGAFDY |
| 313. | PM07F8L1-VH | artificial | nt | CAGGTGCAGCTGGTCGAGTCTGGCGGCGGACTGGTGAAGCCTGGCGAG |
| | | | | TCCCTGAGGCTGTCCTGTGCCGCCTCCGGCTTCACCTTCTCCGACTAC |
| | | | | TACATGTACTGGGTCCGCCAGGCCCCTGGGAAGGGGCTGGAATGGGTG |
| | | | | GCCTCCATCTCCGACGGCGGCTCCAACACCTACTACTCCGACATCATC |
| | | | | AAGGGCCGGTTCACCATCTCCCGGGACAACGCCAAGAACAGCCTGTAC |
| | | | | CTGCAGATGAACTCCCTGAAGGCCGAGGACACCGCCGTGTACTACTGC |
| | | | | GCCCGGGGCTTCCCTCTGCTGAGACACGGCGCCTTCGATTACTGGGGC |
| | | | | CAGGGCACCCTGGTCACCGTCTCCTCA |
| 314. | PM07F8L1-VL | artificial | aa | DIQMTQSPSSLSASVGDRVTITCKASQNVDTNVAWYQQKPGQAPKSLI |
| | | | | YSATYRYSDVPSRFSGSASGTDFTLTISSVQSEDFATYYCQQYNSYPY |
| | | | | TFGGGTKLEIK |
| 315. | PM07F8L1-LCDR1 | artificial | aa | KASQNVDTNVA |
| 316. | PM07F8L1-LCDR2 | artificial | aa | SATYRYS |
| 317. | PM07F8L1-LCDR3 | artificial | aa | QQYNSYPYT |
| 318. | PM07F8L1-VL | artificial | nt | GACATCCAGATGACCCAGTCCCCCAGCTCCCTGTCCGCCTCCGTGGGC |
| | | | | GACAGAGTGACCATCACCTGCAAGGCCTCCCAGAACGTGGACACCAAC |
| | | | | GTGGCCTGGTATCAGCAGAAGCCCGGCCAGGCCCCTAAGTCCCTGATC |
| | | | | TACTCCGCCACCTACCGGTACTCTGACGTGCCTTCCCGGTTCTCCGGC |
| | | | | TCCGCGTCCGGCACCGACTTCACCCTGACCATCTCCAGCGTGCAGTCT |
| | | | | GAGGACTTCGCCACGTACTACTGCCAGCAGTACAACTCCTACCCTTAC |
| | | | | ACCTTCGGCGGAGGGACCAAGCTGGAAATCAAG |
| 319. | PM07F8L1-VH-VL | artificial | aa | QVQLVESGGGLVKPGESLRLSCAASGFTFSDYYMYWVRQAPGKGLEWV |
| | | | | ASISDGGSNTYYSDIIKGRFTISRDNAKNSLYLQMNSLKAEDTAVYYC |
| | | | | ARGFPLLRHGAFDYWGQGTLVTVSSGGGGSGGGGSGGGGSDIQMTQSP |
| | | | | SSLSASVGDRVTITCKASQNVDTNVAWYQQKPGQAPKSLIYSATYRYS |
| | | | | DVPSRFSGSASGTDFTLTISSVQSEDFATYYCQQYNSYPYTFGGGTKL |
| | | | | EIK |
| 320. | PM07F8L1-VH-VL | artificial | nt | CAGGTGCAGCTGGTCGAGTCTGGCGGCGGACTGGTGAAGCCTGGCGAG |
| | | | | TCCCTGAGGCTGTCCTGTGCCGCCTCCGGCTTCACCTTCTCCGACTAC |
| | | | | TACATGTACTGGGTCCGCCAGGCCCCTGGGAAGGGGCTGGAATGGGTG |
| | | | | GCCTCCATCTCCGACGGCGGCTCCAACACCTACTACTCCGACATCATC |
| | | | | AAGGGCCGGTTCACCATCTCCCGGGACAACGCCAAGAACAGCCTGTAC |
| | | | | CTGCAGATGAACTCCCTGAAGGCCGAGGACACCGCCGTGTACTACTGC |
| | | | | GCCCGGGGCTTCCCTCTGCTGAGACACGGCGCCTTCGATTACTGGGGC |
| | | | | CAGGGCACCCTGGTCACCGTCTCCTCAGGTGGTGGTGGTTCTGGCGGC |
| | | | | GGCGGCTCCGGTGGTGGTGGTTCTGACATCCAGATGACCCAGTCCCCC |
| | | | | AGCTCCCTGTCCGCCTCCGTGGGCGACAGAGTGACCATCACCTGCAAG |
| | | | | GCCTCCCAGAACGTGGACACCAACGTGGCCTGGTATCAGCAGAAGCCC |
| | | | | GGCCAGGCCCCTAAGTCCCTGATCTACTCCGCCACCTACCGGTACTCT |
| | | | | GACGTGCCTTCCCGGTTCTCCGGCTCCGCGTCCGGCACCGACTTCACC |
| | | | | CTGACCATCTCCAGCGTGCAGTCTGAGGACTTCGCCACGTACTACTGC |
| | | | | CAGCAGTACAACTCCTACCCTTACACCTTCGGCGGAGGGACCAAGCTG |
| | | | | GAAATCAAG |
| 321. | PM07F8L1 VH-VL × I2C | artificial | aa | QVQLVESGGGLVKPGESLRLSCAASGFTFSDYYMYWVRQAPGKGLEWV |
| | VH-VL | | | ASISDGGSNTYYSDIIKGRFTISRDNAKNSLYLQMNSLKAEDTAVYYC |
| | | | | ARGFPLLRHGAFDYWGQGTLVTVSSGGGGSGGGGSGGGGSDIQMTQSP |
| | | | | SSLSASVGDRVTITCKASQNVDTNVAWYQQKPGQAPKSLIYSATYRYS |
| | | | | DVPSRFSGSASGTDFTLTISSVQSEDFATYYCQQYNSYPYTFGGGTKL |
| | | | | EIKSGGGGSEVQLVESGGGLVQPGGSLKLSCAASGFTFNKYAMNWVRQ |
| | | | | APGKGLEWVARIRSKYNNYATYYADSVKDRFTISRDDSKNTAYLQMNN |
| | | | | LKTEDTAVYYCVRHGNFGNSYISYWAYWGQGTLVTVSSGGGGSGGGGS |
| | | | | GGGGSQTVVTQEPSLTVSPGGTVTLTCGSSTGAVTSGNYPNWVQQKPG |
| | | | | QAPRGLIGGTKFLAPGTPARFSGSLLGGKAALTLSGVQPEDEAEYYCV |
| | | | | LWYSNRWVFGGGTKLTVL |
| 322. | PM07F8L1 VH-VL × I2C | artificial | nt | CAGGTGCAGCTGGTCGAGTCTGGCGGCGGACTGGTGAAGCCTGGCGAG |
| | VH-VL | | | TCCCTGAGGCTGTCCTGTGCCGCCTCCGGCTTCACCTTCTCCGACTAC |
| | | | | TACATGTACTGGGTCCGCCAGGCCCCTGGGAAGGGGCTGGAATGGGTG |
| | | | | GCCTCCATCTCCGACGGCGGCTCCAACACCTACTACTCCGACATCATC |
| | | | | AAGGGCCGGTTCACCATCTCCCGGGACAACGCCAAGAACAGCCTGTAC |
| | | | | CTGCAGATGAACTCCCTGAAGGCCGAGGACACCGCCGTGTACTACTGC |
| | | | | GCCCGGGGCTTCCCTCTGCTGAGACACGGCGCCTTCGATTACTGGGGC |
| | | | | CAGGGCACCCTGGTCACCGTCTCCTCAGGTGGTGGTGGTTCTGGCGGC |
| | | | | GGCGGCTCCGGTGGTGGTGGTTCTGACATCCAGATGACCCAGTCCCCC |
| | | | | AGCTCCCTGTCCGCCTCCGTGGGCGACAGAGTGACCATCACCTGCAAG |
| | | | | GCCTCCCAGAACGTGGACACCAACGTGGCCTGGTATCAGCAGAAGCCC |
| | | | | GGCCAGGCCCCTAAGTCCCTGATCTACTCCGCCACCTACCGGTACTCT |
| | | | | GACGTGCCTTCCCGGTTCTCCGGCTCCGCGTCCGGCACCGACTTCACC |
| | | | | CTGACCATCTCCAGCGTGCAGTCTGAGGACTTCGCCACGTACTACTGC |
| | | | | CAGCAGTACAACTCCTACCCTTACACCTTCGGCGGAGGGACCAAGCTG |
| | | | | GAAATCAAGTCCGGAGGTGGTGGATCCGAGGTGCAGCTGGTCGAGTCT |
| | | | | GGAGGAGGATTGGTGCAGCCTGGAGGGTCATTGAAACTCTCATGTGCA |
| | | | | GCCTCTGGATTCACCTTCAATAAGTACGCCATGAACTGGGTCCGCCAG |
| | | | | GCTCCAGGAAAGGGTTTGGAATGGGTTGCTCGCATAAGAAGTAAATAT |
| | | | | AATAATTATGCAACATATTATGCCGATTCAGTGAAAGACAGGTTCACC |
| | | | | ATCTCCAGAGATGATTCAAAAAACACTGCCTATCTACAAATGAACAAC |
| | | | | TTGAAAACTGAGGACACTGCCGTGTACTACTGTGTGAGACATGGGAAC |
| | | | | TTCGGTAATAGCTACATATCCTACTGGGCTTACTGGGGCCAAGGGACT |
| | | | | CTGGTCACCGTCTCCTCAGGTGGTGGTGGTTCTGGCGGCGGCGGCTCC |
| | | | | GGTGGTGGTGGTTCTCAGACTGTTGTGACTCAGGAACCTTCACTCACC |
| | | | | GTATCACCTGGTGGAACAGTCACACTCACTTGTGGCTCCTCGACTGGG |
| | | | | GCTGTTACATCTGGCAACTACCCAAACTGGGTCCAACAAAAACCAGGT |
| | | | | CAGGCACCCCGTGGTCTAATAGGTGGGACTAAGTTCCTCGCCCCCGGT |
| | | | | ACTCCTGCCAGATTCTCAGGCTCCCTGCTTGGAGGCAAGGCTGCCCTC |
| | | | | ACCCTCTCAGGGGTACAGCCAGAGGATGAGGCAGAATATTACTGTGTT |
| | | | | CTATGGTACAGCAACCGCTGGGTGTTCGGTGGAGGAACCAAACTGACT |
| | | | | GTCCT |
| 323. | PM07F8L2-VH | artificial | aa | QVQLVESGGGLVKPGESLRLSCAASGFTFSDYYMYWVRQAPGKGLEWV |
| | | | | ASISDGGSNTYYSDIIKGRFTISRDNAKNSLYLQMNSLKAEDTAVYYC |
| | | | | ARGFPLLRHGAFDYWGQGTLVTVSS |
| 324. | PM07F8L2-HCDR1 | artificial | aa | DYYMS |
| 325. | PM07F8L2-HCDR2 | artificial | aa | SISDGGSNTYYSDIIKG |
| 326. | PM07F8L2-HCDR3 | artificial | aa | GFPLLRHGAFDY |
| 327. | PM07F8L2-VH | artificial | nt | CAGGTGCAGCTGGTCGAGTCTGGCGGCGGACTGGTGAAGCCTGGCGAG |
| | | | | TCCCTGAGGCTGTCCTGTGCCGCCTCCGGCTTCACCTTCTCCGACTAC |
| | | | | TACATGTACTGGGTCCGCCAGGCCCCTGGGAAGGGGCTGGAATGGGTG |
| | | | | GCCTCCATCTCCGACGGCGGCTCCAACACCTACTACTCCGACATCATC |
| | | | | AAGGGCCGGTTCACCATCTCCCGGGACAACGCCAAGAACAGCCTGTAC |
| | | | | CTGCAGATGAACTCCCTGAAGGCCGAGGACACCGCCGTGTACTACTGC |
| | | | | GCCCGGGGCTTCCCTCTGCTGAGACACGGCGCCTTCGATTACTGGGGC |
| | | | | CAGGGCACCCTGGTCACCGTCTCCTCA |
| 328. | PM07F8L2-VL | artificial | aa | DIQMTQSPSSLSASVGDRVTITCRASQNVDTNVAWYQQKPGQAPKSLI |
| | | | | YSASYRYSDVPSRFSGSASGTDFTLTISSVQSEDFATYYCQQYNSYPY |
| | | | | TFGGGTKLEIK |
| 329. | PM07F8L2-LCDR1 | artificial | aa | RASQNVDTNVA |
| 330. | PM07F8L2-LCDR2 | artificial | aa | SASYRYS |
| 331. | PM07F8L2-LCDR3 | artificial | aa | QQYNSYPYT |
| 332. | PM07F8L2-VL | artificial | nt | GACATCCAGATGACCCAGTCCCCCAGCTCCCTGTCCGCCTCCGTGGGC |
| | | | | GACAGAGTGACCATCACCTGCAGGGCCTCCCAGAACGTGGACACCAAC |
| | | | | GTGGCCTGGTATCAGCAGAAGCCCGGCCAGGCCCCTAAGTCCCTGATC |
| | | | | TACTCCGCCTCCTACCGGTACTCTGACGTGCCTTCCCGGTTCTCCGGC |
| | | | | TCCGCGTCCGGCACCGACTTCACCCTGACCATCTCCAGCGTGCAGTCT |
| | | | | GAGGACTTCGCCACGTACTACTGCCAGCAGTACAACTCCTACCCTTAC |
| | | | | ACCTTCGGCGGAGGGACCAAGCTGGAAATCAAG |
| 333. | PM07F8L2-VH-VL | artificial | aa | QVQLVESGGGLVKPGESLRLSCAASGFTFSDYYMYWVRQAPGKGLEWV |
| | | | | ASISDGGSNTYYSDIIKGRFTISRDNAKNSLYLQMNSLKAEDTAVYYC |
| | | | | ARGFPLLRHGAFDYWGQGTLVTVSSGGGGSGGGGSGGGGSDIQMTQSP |
| | | | | SSLSASVGDRVTITCRASQNVDTNVAWYQQKPGQAPKSLIYSASYRYS |
| | | | | DVPSRFSGSASGTDFTLTISSVQSEDFATYYCQQYNSYPYTFGGGTKL |
| | | | | EIK |
| 334. | PM07F8L2-VH-VL | artificial | nt | CAGGTGCAGCTGGTCGAGTCTGGCGGCGGACTGGTGAAGCCTGGCGAG |
| | | | | TCCCTGAGGCTGTCCTGTGCCGCCTCCGGCTTCACCTTCTCCGACTAC |
| | | | | TACATGTACTGGGTCCGCCAGGCCCCTGGGAAGGGGCTGGAATGGGTG |
| | | | | GCCTCCATCTCCGACGGCGGCTCCAACACCTACTACTCCGACATCATC |
| | | | | AAGGGCCGGTTCACCATCTCCCGGGACAACGCCAAGAACAGCCTGTAC |
| | | | | CTGCAGATGAACTCCCTGAAGGCCGAGGACACCGCCGTGTACTACTGC |
| | | | | GCCCGGGGCTTCCCTCTGCTGAGACACGGCGCCTTCGATTACTGGGGC |
| | | | | CAGGGCACCCTGGTCACCGTCTCCTCAGGTGGTGGTGGTTCTGGCGGC |
| | | | | GGCGGCTCCGGTGGTGGTGGTTCTGACATCCAGATGACCCAGTCCCCC |
| | | | | AGCTCCCTGTCCGCCTCCGTGGGCGACAGAGTGACCATCACCTGCAGG |
| | | | | GCCTCCCAGAACGTGGACACCAACGTGGCCTGGTATCAGCAGAAGCCC |
| | | | | GGCCAGGCCCCTAAGTCCCTGATCTACTCCGCCTCCTACCGGTACTCT |
| | | | | GACGTGCCTTCCCGGTTCTCCGGCTCCGCGTCCGGCACCGACTTCACC |
| | | | | CTGACCATCTCCAGCGTGCAGTCTGAGGACTTCGCCACGTACTACTGC |
| | | | | CAGCAGTACAACTCCTACCCTTACACCTTCGGCGGAGGGACCAAGCTG |
| | | | | GAAATCAAG |
| 335. | PM07F8L2 VH-VL × I2C | artificial | aa | QVQLVESGGGLVKPGESLRLSCAASGFTFSDYYMYWVRQAPGKGLEWV |
| | VH-VL | | | ASISDGGSNTYYSDIIKGRFTISRDNAKNSLYLQMNSLKAEDTAVYYC |
| | | | | ARGFPLLRHGAFDYWGQGTLVTVSSGGGGSGGGGSGGGGSDIQMTQSP |
| | | | | SSLSASVGDRVTITCRASQNVDTNVAWYQQKPGQAPKSLIYSASYRYS |
| | | | | DVPSRFSGSASGTDFTLTISSVQSEDFATYYCQQYNSYPYTFGGGTKL |
| | | | | EIKSGGGGSEVQLVESGGGLVQPGGSLKLSCAASGFTFNKYAMNWVRQ |
| | | | | APGKGLEWVARIRSKYNNYATYYADSVKDRFTISRDDSKNTAYLQMNN |
| | | | | LKTEDTAVYYCVRHGNFGNSYISYWAYWGQGTLVTVSSGGGGSGGGGS |
| | | | | GGGGSQTVVTQEPSLTVSPGGTVTLTCGSSTGAVTSGNYPNWVQQKPG |
| | | | | QAPRGLIGGTKFLAPGTPARFSGSLLGGKAALTLSGVQPEDEAEYYCV |
| | | | | LWYSNRWVFGGGTKLTVL |
| 336. | PM07F8L2 VH-VL × I2C | artificial | nt | CAGGTGCAGCTGGTCGAGTCTGGCGGCGGACTGGTGAAGCCTGGCGAG |
| | VH-VL | | | TCCCTGAGGCTGTCCTGTGCCGCCTCCGGCTTCACCTTCTCCGACTAC |
| | | | | TACATGTACTGGGTCCGCCAGGCCCCTGGGAAGGGGCTGGAATGGGTG |
| | | | | GCCTCCATCTCCGACGGCGGCTCCAACACCTACTACTCCGACATCATC |
| | | | | AAGGGCCGGTTCACCATCTCCCGGGACAACGCCAAGAACAGCCTGTAC |
| | | | | CTGCAGATGAACTCCCTGAAGGCCGAGGACACCGCCGTGTACTACTGC |
| | | | | GCCCGGGGCTTCCCTCTGCTGAGACACGGCGCCTTCGATTACTGGGGC |
| | | | | CAGGGCACCCTGGTCACCGTCTCCTCAGGTGGTGGTGGTTCTGGCGGC |
| | | | | GGCGGCTCCGGTGGTGGTGGTTCTGACATCCAGATGACCCAGTCCCCC |
| | | | | AGCTCCCTGTCCGCCTCCGTGGGCGACAGAGTGACCATCACCTGCAGG |
| | | | | GCCTCCCAGAACGTGGACACCAACGTGGCCTGGTATCAGCAGAAGCCC |
| | | | | GGCCAGGCCCCTAAGTCCCTGATCTACTCCGCCTCCTACCGGTACTCT |
| | | | | GACGTGCCTTCCCGGTTCTCCGGCTCCGCGTCCGGCACCGACTTCACC |
| | | | | CTGACCATCTCCAGCGTGCAGTCTGAGGACTTCGCCACGTACTACTGC |
| | | | | CAGCAGTACAACTCCTACCCTTACACCTTCGGCGGAGGGACCAAGCTG |
| | | | | GAAATCAAGTCCGGAGGTGGTGGATCCGAGGTGCAGCTGGTCGAGTCT |
| | | | | GGAGGAGGATTGGTGCAGCCTGGAGGGTCATTGAAACTCTCATGTGCA |
| | | | | GCCTCTGGATTCACCTTCAATAAGTACGCCATGAACTGGGTCCGCCAG |
| | | | | GCTCCAGGAAAGGGTTTGGAATGGGTTGCTCGCATAAGAAGTAAATAT |
| | | | | AATAATTATGCAACATATTATGCCGATTCAGTGAAAGACAGGTTCACC |
| | | | | ATCTCCAGAGATGATTCAAAAAACACTGCCTATCTACAAATGAACAAC |
| | | | | TTGAAAACTGAGGACACTGCCGTGTACTACTGTGTGAGACATGGGAAC |
| | | | | TTCGGTAATAGCTACATATCCTACTGGGCTTACTGGGGCCAAGGGACT |
| | | | | CTGGTCACCGTCTCCTCAGGTGGTGGTGGTTCTGGCGGCGGCGGCTCC |
| | | | | GGTGGTGGTGGTTCTCAGACTGTTGTGACTCAGGAACCTTCACTCACC |
| | | | | GTATCACCTGGTGGAACAGTCACACTCACTTGTGGCTCCTCGACTGGG |
| | | | | GCTGTTACATCTGGCAACTACCCAAACTGGGTCCAACAAAAACCAGGT |
| | | | | CAGGCACCCCGTGGTCTAATAGGTGGGACTAAGTTCCTCGCCCCCGGT |
| | | | | ACTCCTGCCAGATTCTCAGGCTCCCTGCTTGGAGGCAAGGCTGCCCTC |
| | | | | ACCCTCTCAGGGGTACAGCCAGAGGATGAGGCAGAATATTACTGTGTT |
| | | | | CTATGGTACAGCAACCGCTGGGTGTTCGGTGGAGGAACCAAACTGACT |
| | | | | GTCCT |
| 337. | PM07F8L3-VH | artificial | aa | QVQLVESGGGLVKPGESLRLSCAASGFTFSDYYMYWVRQAPGKGLEWV |
| | | | | ASISDGGSNTYYSDIIKGRFTISRDNAKNSLYLQMNSLKAEDTAVYYC |
| | | | | ARGFPLLRHGAFDYWGQGTLVTVSS |
| 338. | PM07F8L3-HCDR1 | artificial | aa | DYYMS |
| 339. | PM07F8L3-HCDR2 | artificial | aa | SISDGGSNTYYSDIIKG |
| 340. | PM07F8L3-HCDR3 | artificial | aa | GFPLLRHGAFDY |
| 341. | PM07F8L3-VH | artificial | nt | CAGGTGCAGCTGGTCGAGTCTGGCGGCGGACTGGTGAAGCCTGGCGAG |
| | | | | TCCCTGAGGCTGTCCTGTGCCGCCTCCGGCTTCACCTTCTCCGACTAC |
| | | | | TACATGTACTGGGTCCGCCAGGCCCCTGGGAAGGGGCTGGAATGGGTG |
| | | | | GCCTCCATCTCCGACGGCGGCTCCAACACCTACTACTCCGACATCATC |
| | | | | AAGGGCCGGTTCACCATCTCCCGGGACAACGCCAAGAACAGCCTGTAC |
| | | | | CTGCAGATGAACTCCCTGAAGGCCGAGGACACCGCCGTGTACTACTGC |
| | | | | GCCCGGGGCTTCCCTCTGCTGAGACACGGCGCCTTCGATTACTGGGGC |
| | | | | CAGGGCACCCTGGTCACCGTCTCCTCA |
| 342. | PM07F8L3-VL | artificial | aa | DIQMTQSPSSLSASVGDRVTITCRASQNVDTNVAWYQQKPGQAPKSLI |
| | | | | YSATYRYSDVPSRFSGSASGTDFTLTISSVQSEDFATYYCQQYDSYPY |
| | | | | TFGGGTKLEIK |
| 343. | PM07F8L3-LCDR1 | artificial | aa | RASQNVDTNVA |
| 344. | PM07F8L3-LCDR2 | artificial | aa | SATYRYS |
| 345. | PM07F8L3-LCDR3 | artificial | aa | QQYDSYPYT |
| 346. | PM07F8L3-VL | artificial | nt | GACATCCAGATGACCCAGTCCCCCAGCTCCCTGTCCGCCTCCGTGGGC |
| | | | | GACAGAGTGACCATCACCTGCAGGGCCTCCCAGAACGTGGACACCAAC |
| | | | | GTGGCCTGGTATCAGCAGAAGCCCGGCCAGGCCCCTAAGTCCCTGATC |
| | | | | TACTCCGCCACCTACCGGTACTCTGACGTGCCTTCCCGGTTCTCCGGC |
| | | | | TCCGCGTCCGGCACCGACTTCACCCTGACCATCTCCAGCGTGCAGTCT |
| | | | | GAGGACTTCGCCACGTACTACTGCCAGCAGTACGACTCCTACCCTTAC |
| | | | | ACCTTCGGCGGAGGGACCAAGCTGGAAATCAAG |
| 347. | PM07F8L3-VH-VL | artificial | aa | QVQLVESGGGLVKPGESLRLSCAASGFTFSDYYMYWVRQAPGKGLEWV |
| | | | | ASISDGGSNTYYSDIIKGRFTISRDNAKNSLYLQMNSLKAEDTAVYYC |
| | | | | ARGFPLLRHGAFDYWGQGTLVTVSSGGGGSGGGGSGGGGSDIQMTQSP |
| | | | | SSLSASVGDRVTITCRASQNVDTNVAWYQQKPGQAPKSLIYSATYRYS |
| | | | | DVPSRFSGSASGTDFTLTISSVQSEDFATYYCQQYDSYPYTFGGGTKL |
| | | | | EIK |
| 348. | PM07F8L3-VH-VL | artificial | nt | CAGGTGCAGCTGGTCGAGTCTGGCGGCGGACTGGTGAAGCCTGGCGAG |
| | | | | TCCCTGAGGCTGTCCTGTGCCGCCTCCGGCTTCACCTTCTCCGACTAC |
| | | | | TACATGTACTGGGTCCGCCAGGCCCCTGGGAAGGGGCTGGAATGGGTG |
| | | | | GCCTCCATCTCCGACGGCGGCTCCAACACCTACTACTCCGACATCATC |
| | | | | AAGGGCCGGTTCACCATCTCCCGGGACAACGCCAAGAACAGCCTGTAC |
| | | | | CTGCAGATGAACTCCCTGAAGGCCGAGGACACCGCCGTGTACTACTGC |
| | | | | GCCCGGGGCTTCCCTCTGCTGAGACACGGCGCCTTCGATTACTGGGGC |
| | | | | CAGGGCACCCTGGTCACCGTCTCCTCAGGTGGTGGTGGTTCTGGCGGC |
| | | | | GGCGGCTCCGGTGGTGGTGGTTCTGACATCCAGATGACCCAGTCCCCC |
| | | | | AGCTCCCTGTCCGCCTCCGTGGGCGACAGAGTGACCATCACCTGCAGG |
| | | | | GCCTCCCAGAACGTGGACACCAACGTGGCCTGGTATCAGCAGAAGCCC |
| | | | | GGCCAGGCCCCTAAGTCCCTGATCTACTCCGCCACCTACCGGTACTCT |
| | | | | GACGTGCCTTCCCGGTTCTCCGGCTCCGCGTCCGGCACCGACTTCACC |
| | | | | CTGACCATCTCCAGCGTGCAGTCTGAGGACTTCGCCACGTACTACTGC |
| | | | | CAGCAGTACGACTCCTACCCTTACACCTTCGGCGGAGGGACCAAGCTG |
| | | | | GAAATCAAG |
| 349. | PM07F8L3 VH-VL × I2C | artificial | aa | QVQLVESGGGLVKPGESLRLSCAASGFTFSDYYMYWVRQAPGKGLEWV |
| | VH-VL | | | ASISDGGSNTYYSDIIKGRFTISRDNAKNSLYLQMNSLKAEDTAVYYC |
| | | | | ARGFPLLRHGAFDYWGQGTLVTVSSGGGGSGGGGSGGGGSDIQMTQSP |
| | | | | SSLSASVGDRVTITCRASQNVDTNVAWYQQKPGQAPKSLIYSATYRYS |
| | | | | DVPSRFSGSASGTDFTLTISSVQSEDFATYYCQQYDSYPYTFGGGTKL |
| | | | | EIKSGGGGSEVQLVESGGGLVQPGGSLKLSCAASGFTFNKYAMNWVRQ |
| | | | | APGKGLEWVARIRSKYNNYATYYADSVKDRFTISRDDSKNTAYLQMNN |
| | | | | LKTEDTAVYYCVRHGNFGNSYISYWAYWGQGTLVTVSSGGGGSGGGGS |
| | | | | GGGGSQTVVTQEPSLTVSPGGTVTLTCGSSTGAVTSGNYPNWVQQKPG |
| | | | | QAPRGLIGGTKFLAPGTPARFSGSLLGGKAALTLSGVQPEDEAEYYCV |
| | | | | LWYSNRWVFGGGTKLTVL |
| 350. | PM07F8L3 VH-VL × I2C | artificial | nt | CAGGTGCAGCTGGTCGAGTCTGGCGGCGGACTGGTGAAGCCTGGCGAG |
| | VH-VL | | | TCCCTGAGGCTGTCCTGTGCCGCCTCCGGCTTCACCTTCTCCGACTAC |
| | | | | TACATGTACTGGGTCCGCCAGGCCCCTGGGAAGGGGCTGGAATGGGTG |
| | | | | GCCTCCATCTCCGACGGCGGCTCCAACACCTACTACTCCGACATCATC |
| | | | | AAGGGCCGGTTCACCATCTCCCGGGACAACGCCAAGAACAGCCTGTAC |
| | | | | CTGCAGATGAACTCCCTGAAGGCCGAGGACACCGCCGTGTACTACTGC |
| | | | | GCCCGGGGCTTCCCTCTGCTGAGACACGGCGCCTTCGATTACTGGGGC |
| | | | | CAGGGCACCCTGGTCACCGTCTCCTCAGGTGGTGGTGGTTCTGGCGGC |
| | | | | GGCGGCTCCGGTGGTGGTGGTTCTGACATCCAGATGACCCAGTCCCCC |
| | | | | AGCTCCCTGTCCGCCTCCGTGGGCGACAGAGTGACCATCACCTGCAGG |
| | | | | GCCTCCCAGAACGTGGACACCAACGTGGCCTGGTATCAGCAGAAGCCC |
| | | | | GGCCAGGCCCCTAAGTCCCTGATCTACTCCGCCACCTACCGGTACTCT |
| | | | | GACGTGCCTTCCCGGTTCTCCGGCTCCGCGTCCGGCACCGACTTCACC |
| | | | | CTGACCATCTCCAGCGTGCAGTCTGAGGACTTCGCCACGTACTACTGC |
| | | | | CAGCAGTACGACTCCTACCCTTACACCTTCGGCGGAGGGACCAAGCTG |
| | | | | GAAATCAAGTCCGGAGGTGGTGGATCCGAGGTGCAGCTGGTCGAGTCT |
| | | | | GGAGGAGGATTGGTGCAGCCTGGAGGGTCATTGAAACTCTCATGTGCA |
| | | | | GCCTCTGGATTCACCTTCAATAAGTACGCCATGAACTGGGTCCGCCAG |
| | | | | GCTCCAGGAAAGGGTTTGGAATGGGTTGCTCGCATAAGAAGTAAATAT |
| | | | | AATAATTATGCAACATATTATGCCGATTCAGTGAAAGACAGGTTCACC |
| | | | | ATCTCCAGAGATGATTCAAAAAACACTGCCTATCTACAAATGAACAAC |
| | | | | TTGAAAACTGAGGACACTGCCGTGTACTACTGTGTGAGACATGGGAAC |
| | | | | TTCGGTAATAGCTACATATCCTACTGGGCTTACTGGGGCCAAGGGACT |
| | | | | CTGGTCACCGTCTCCTCAGGTGGTGGTGGTTCTGGCGGCGGCGGCTCC |
| | | | | GGTGGTGGTGGTTCTCAGACTGTTGTGACTCAGGAACCTTCACTCACC |
| | | | | GTATCACCTGGTGGAACAGTCACACTCACTTGTGGCTCCTCGACTGGG |
| | | | | GCTGTTACATCTGGCAACTACCCAAACTGGGTCCAACAAAAACCAGGT |
| | | | | CAGGCACCCCGTGGTCTAATAGGTGGGACTAAGTTCCTCGCCCCCGGT |
| | | | | ACTCCTGCCAGATTCTCAGGCTCCCTGCTTGGAGGCAAGGCTGCCCTC |
| | | | | ACCCTCTCAGGGGTACAGCCAGAGGATGAGGCAGAATATTACTGTGTT |
| | | | | CTATGGTACAGCAACCGCTGGGTGTTCGGTGGAGGAACCAAACTGACT |
| | | | | GTCCTA |
| 351. | PM07F8H3-VH | artificial | aa | QVQLVESGGGLVKPGESLRLSCAASGFTFSDYYMYWVRQAPGKGLEWV |
| | | | | ASISDGGSNTYYSDIIKGRFTISRDNAKNSLYLQMNSLKAEDTAVYYC |
| | | | | ARGFPLLRHGAMDYWGQGTLVTVSS |
| 352. | PM07F8H3-HCDR1 | artificial | aa | DYYMY |
| 353. | PM07F8H3-HCDR2 | artificial | aa | SISDGGSNTYYSDIIKG |
| 354. | PM07F8H3-HCDR3 | artificial | aa | GFPLLRHGAMDY |
| 355. | PM07F8H3-VH | artificial | nt | CAGGTGCAGCTGGTCGAGTCTGGCGGCGGACTGGTGAAGCCTGGCGAG |
| | | | | TCCCTGAGGCTGTCCTGTGCCGCCTCCGGCTTCACCTTCTCCGACTAC |
| | | | | TACATGTACTGGGTCCGCCAGGCCCCTGGGAAGGGGCTGGAATGGGTG |
| | | | | GCCTCCATCTCCGACGGCGGCTCCAACACCTACTACTCCGACATCATC |
| | | | | AAGGGCCGGTTCACCATCTCCCGGGACAACGCCAAGAACAGCCTGTAC |
| | | | | CTGCAGATGAACTCCCTGAAGGCCGAGGACACCGCCGTGTACTACTGC |
| | | | | GCCCGGGGCTTCCCTCTGCTGAGACACGGCGCCATGGATTACTGGGGC |
| | | | | CAGGGCACCCTGGTCACCGTCTCCTCA |
| 356. | PM07F8H3-VL | artificial | aa | DIQMTQSPSSLSASVGDRVTITCRASQNVDTNVAWYQQKPGQAPKSLI |
| | | | | YSATYRYSDVPSRFSGSASGTDFTLTISSVQSEDFATYYCQQYNSYPY |
| | | | | TFGGGTKLEIK |
| 357. | PM07F8H3-LCDR1 | artificial | aa | RASQNVDTNVA |
| 358. | PM07F8H3-LCDR2 | artificial | aa | SATYRYS |
| 359. | PM07F8H3-LCDR3 | artificial | aa | QQYNSYPYT |
| 360. | PM07F8H3-VL | artificial | nt | GACATCCAGATGACCCAGTCCCCCAGCTCCCTGTCCGCCTCCGTGGGC |
| | | | | GACAGAGTGACCATCACCTGCAGGGCCTCCCAGAACGTGGACACCAAC |
| | | | | GTGGCCTGGTATCAGCAGAAGCCCGGCCAGGCCCCTAAGTCCCTGATC |
| | | | | TACTCCGCCACCTACCGGTACTCTGACGTGCCTTCCCGGTTCTCCGGC |
| | | | | TCCGCGTCCGGCACCGACTTCACCCTGACCATCTCCAGCGTGCAGTCT |
| | | | | GAGGACTTCGCCACGTACTACTGCCAGCAGTACAACTCCTACCCTTAC |
| | | | | ACCTTCGGCGGAGGGACCAAGCTGGAAATCAAG |
| 361. | PM07F8H3-VH-VL | artificial | aa | QVQLVESGGGLVKPGESLRLSCAASGFTFSDYYMYWVRQAPGKGLEWV |
| | | | | ASISDGGSNTYYSDIIKGRFTISRDNAKNSLYLQMNSLKAEDTAVYYC |
| | | | | ARGFPLLRHGAMDYWGQGTLVTVSSGGGGSGGGGSGGGGSDIQMTQSP |
| | | | | SSLSASVGDRVTITCRASQNVDTNVAWYQQKPGQAPKSLIYSATYRYS |
| | | | | DVPSRFSGSASGTDFTLTISSVQSEDFATYYCQQYNSYPYTFGGGTKL |
| | | | | EIK |
| 362. | PM07F8H3-VH-VL | artificial | nt | CAGGTGCAGCTGGTCGAGTCTGGCGGCGGACTGGTGAAGCCTGGCGAG |
| | | | | TCCCTGAGGCTGTCCTGTGCCGCCTCCGGCTTCACCTTCTCCGACTAC |
| | | | | TACATGTACTGGGTCCGCCAGGCCCCTGGGAAGGGGCTGGAATGGGTG |
| | | | | GCCTCCATCTCCGACGGCGGCTCCAACACCTACTACTCCGACATCATC |
| | | | | AAGGGCCGGTTCACCATCTCCCGGGACAACGCCAAGAACAGCCTGTAC |
| | | | | CTGCAGATGAACTCCCTGAAGGCCGAGGACACCGCCGTGTACTACTGC |
| | | | | GCCCGGGGCTTCCCTCTGCTGAGACACGGCGCCATGGATTACTGGGGC |
| | | | | CAGGGCACCCTGGTCACCGTCTCCTCAGGTGGTGGTGGTTCTGGCGGC |
| | | | | GGCGGCTCCGGTGGTGGTGGTTCTGACATCCAGATGACCCAGTCCCCC |
| | | | | AGCTCCCTGTCCGCCTCCGTGGGCGACAGAGTGACCATCACCTGCAGG |
| | | | | GCCTCCCAGAACGTGGACACCAACGTGGCCTGGTATCAGCAGAAGCCC |
| | | | | GGCCAGGCCCCTAAGTCCCTGATCTACTCCGCCACCTACCGGTACTCT |
| | | | | GACGTGCCTTCCCGGTTCTCCGGCTCCGCGTCCGGCACCGACTTCACC |
| | | | | CTGACCATCTCCAGCGTGCAGTCTGAGGACTTCGCCACGTACTACTGC |
| | | | | CAGCAGTACAACTCCTACCCTTACACCTTCGGCGGAGGGACCAAGCTG |
| | | | | GAAATCAAG |
| 363. | PM07F8H3 VH-VL × I2C | artificial | aa | QVQLVESGGGLVKPGESLRLSCAASGFTFSDYYMYWVRQAPGKGLEWV |
| | VH-VL | | | ASISDGGSNTYYSDIIKGRFTISRDNAKNSLYLQMNSLKAEDTAVYYC |
| | | | | ARGFPLLRHGAMDYWGQGTLVTVSSGGGGSGGGGSGGGGSDIQMTQSP |
| | | | | SSLSASVGDRVTITCRASQNVDTNVAWYQQKPGQAPKSLIYSATYRYS |
| | | | | DVPSRFSGSASGTDFTLTISSVQSEDFATYYCQQYNSYPYTFGGGTKL |
| | | | | EIKSGGGGSEVQLVESGGGLVQPGGSLKLSCAASGFTFNKYAMNWVRQ |
| | | | | APGKGLEWVARIRSKYNNYATYYADSVKDRFTISRDDSKNTAYLQMNN |
| | | | | LKTEDTAVYYCVRHGNFGNSYISYWAYWGQGTLVTVSSGGGGSGGGGS |
| | | | | GGGGSQTVVTQEPSLTVSPGGTVTLTCGSSTGAVTSGNYPNWVQQKPG |
| | | | | QAPRGLIGGTKFLAPGTPARFSGSLLGGKAALTLSGVQPEDEAEYYCV |
| | | | | LWYSNRWVFGGGTKLTVL |
| 364. | PM07F8H3 VH-VL × I2C | artificial | nt | CAGGTGCAGCTGGTCGAGTCTGGCGGCGGACTGGTGAAGCCTGGCGAG |
| | VH-VL | | | TCCCTGAGGCTGTCCTGTGCCGCCTCCGGCTTCACCTTCTCCGACTAC |
| | | | | TACATGTACTGGGTCCGCCAGGCCCCTGGGAAGGGGCTGGAATGGGTG |
| | | | | GCCTCCATCTCCGACGGCGGCTCCAACACCTACTACTCCGACATCATC |
| | | | | AAGGGCCGGTTCACCATCTCCCGGGACAACGCCAAGAACAGCCTGTAC |
| | | | | CTGCAGATGAACTCCCTGAAGGCCGAGGACACCGCCGTGTACTACTGC |
| | | | | GCCCGGGGCTTCCCTCTGCTGAGACACGGCGCCATGGATTACTGGGGC |
| | | | | CAGGGCACCCTGGTCACCGTCTCCTCAGGTGGTGGTGGTTCTGGCGGC |
| | | | | GGCGGCTCCGGTGGTGGTGGTTCTGACATCCAGATGACCCAGTCCCCC |
| | | | | AGCTCCCTGTCCGCCTCCGTGGGCGACAGAGTGACCATCACCTGCAGG |
| | | | | GCCTCCCAGAACGTGGACACCAACGTGGCCTGGTATCAGCAGAAGCCC |
| | | | | GGCCAGGCCCCTAAGTCCCTGATCTACTCCGCCACCTACCGGTACTCT |
| | | | | GACGTGCCTTCCCGGTTCTCCGGCTCCGCGTCCGGCACCGACTTCACC |
| | | | | CTGACCATCTCCAGCGTGCAGTCTGAGGACTTCGCCACGTACTACTGC |
| | | | | CAGCAGTACAACTCCTACCCTTACACCTTCGGCGGAGGGACCAAGCTG |
| | | | | GAAATCAAGTCCGGAGGTGGTGGATCCGAGGTGCAGCTGGTCGAGTCT |
| | | | | GGAGGAGGATTGGTGCAGCCTGGAGGGTCATTGAAACTCTCATGTGCA |
| | | | | GCCTCTGGATTCACCTTCAATAAGTACGCCATGAACTGGGTCCGCCAG |
| | | | | GCTCCAGGAAAGGGTTTGGAATGGGTTGCTCGCATAAGAAGTAAATAT |
| | | | | AATAATTATGCAACATATTATGCCGATTCAGTGAAAGACAGGTTCACC |
| | | | | ATCTCCAGAGATGATTCAAAAAACACTGCCTATCTACAAATGAACAAC |
| | | | | TTGAAAACTGAGGACACTGCCGTGTACTACTGTGTGAGACATGGGAAC |
| | | | | TTCGGTAATAGCTACATATCCTACTGGGCTTACTGGGGCCAAGGGACT |
| | | | | CTGGTCACCGTCTCCTCAGGTGGTGGTGGTTCTGGCGGCGGCGGCTCC |
| | | | | GGTGGTGGTGGTTCTCAGACTGTTGTGACTCAGGAACCTTCACTCACC |
| | | | | GTATCACCTGGTGGAACAGTCACACTCACTTGTGGCTCCTCGACTGGG |
| | | | | GCTGTTACATCTGGCAACTACCCAAACTGGGTCCAACAAAAACCAGGT |
| | | | | CAGGCACCCCGTGGTCTAATAGGTGGGACTAAGTTCCTCGCCCCCGGT |
| | | | | ACTCCTGCCAGATTCTCAGGCTCCCTGCTTGGAGGCAAGGCTGCCCTC |
| | | | | ACCCTCTCAGGGGTACAGCCAGAGGATGAGGCAGAATATTACTGTGTT |
| | | | | CTATGGTACAGCAACCGCTGGGTGTTCGGTGGAGGAACCAAACTGACT |
| | | | | GTCCT |
| 365. | PM07F8H2-VH | artificial | aa | QVQLVESGGGLVKPGESLRLSCAASGFTFSDYYMYWVRQAPGKGLEWV |
| | | | | AIISDGGYYTYYSDIIKGRFTISRDNAKNSLYLQMNSLKAEDTAVYYC |
| | | | | ARGFPLLRHGAFDYWGQGTLVTVSS |
| 366. | PM07F8H2-HCDR1 | artificial | aa | DYYMY |
| 367. | PM07F8H2-HCDR2 | artificial | aa | IISDGGYYTYYSDIIKG |
| 368. | PM07F8H2-HCDR3 | artificial | aa | GFPLLRHGAFDY |
| 369. | PM07F8H2-VH | artificial | nt | CAGGTGCAGCTGGTCGAGTCTGGCGGCGGACTGGTGAAGCCTGGCGAG |
| | | | | TCCCTGAGGCTGTCCTGTGCCGCCTCCGGCTTCACCTTCTCCGACTAC |
| | | | | TACATGTACTGGGTCCGCCAGGCCCCTGGGAAGGGGCTGGAATGGGTG |
| | | | | GCCATCATCTCCGACGGCGGCTACTACACCTACTACTCCGACATCATC |
| | | | | AAGGGCCGGTTCACCATCTCCCGGGACAACGCCAAGAACAGCCTGTAC |
| | | | | CTGCAGATGAACTCCCTGAAGGCCGAGGACACCGCCGTGTACTACTGC |
| | | | | GCCCGGGGCTTCCCTCTGCTGAGACACGGCGCCTTCGATTACTGGGGC |
| | | | | CAGGGCACCCTGGTCACCGTCTCCTCA |
| 370. | PM07F8H2-VL | artificial | aa | DIQMTQSPSSLSASVGDRVTITCRASQNVDTNVAWYQQKPGQAPKSLI |
| | | | | YSATYRYSDVPSRFSGSASGTDFTLTISSVQSEDFATYYCQQYNSYPY |
| | | | | TFGGGTKLEIK |
| 371. | PM07F8H2-LCDR1 | artificial | aa | RASQNVDTNVA |
| 372. | PM07F8H2-LCDR2 | artificial | aa | SATYRYS |
| 373. | PM07F8H2-LCDR3 | artificial | aa | QQYNSYPYT |
| 374. | PM07F8H2-VL | artificial | nt | GACATCCAGATGACCCAGTCCCCCAGCTCCCTGTCCGCCTCCGTGGGC |
| | | | | GACAGAGTGACCATCACCTGCAGGGCCTCCCAGAACGTGGACACCAAC |
| | | | | GTGGCCTGGTATCAGCAGAAGCCCGGCCAGGCCCCTAAGTCCCTGATC |
| | | | | TACTCCGCCACCTACCGGTACTCTGACGTGCCTTCCCGGTTCTCCGGC |
| | | | | TCCGCGTCCGGCACCGACTTCACCCTGACCATCTCCAGCGTGCAGTCT |
| | | | | GAGGACTTCGCCACGTACTACTGCCAGCAGTACAACTCCTACCCTTAC |
| | | | | ACCTTCGGCGGAGGGACCAAGCTGGAAATCAAG |
| 375. | PM07F8H2-VH-VL | artificial | aa | QVQLVESGGGLVKPGESLRLSCAASGFTFSDYYMYWVRQAPGKGLEWV |
| | | | | AIISDGGYYTYYSDIIKGRFTISRDNAKNSLYLQMNSLKAEDTAVYYC |
| | | | | ARGFPLLRHGAFDYWGQGTLVTVSSGGGGSGGGGSGGGGSDIQMTQSP |
| | | | | SSLSASVGDRVTITCRASQNVDTNVAWYQQKPGQAPKSLIYSATYRYS |
| | | | | DVPSRFSGSASGTDFTLTISSVQSEDFATYYCQQYNSYPYTFGGGTKL |
| | | | | EIK |
| 376. | PM07F8H2-VH-VL | artificial | nt | CAGGTGCAGCTGGTCGAGTCTGGCGGCGGACTGGTGAAGCCTGGCGAG |
| | | | | TCCCTGAGGCTGTCCTGTGCCGCCTCCGGCTTCACCTTCTCCGACTAC |
| | | | | TACATGTACTGGGTCCGCCAGGCCCCTGGGAAGGGGCTGGAATGGGTG |
| | | | | GCCATCATCTCCGACGGCGGCTACTACACCTACTACTCCGACATCATC |
| | | | | AAGGGCCGGTTCACCATCTCCCGGGACAACGCCAAGAACAGCCTGTAC |
| | | | | CTGCAGATGAACTCCCTGAAGGCCGAGGACACCGCCGTGTACTACTGC |
| | | | | GCCCGGGGCTTCCCTCTGCTGAGACACGGCGCCTTCGATTACTGGGGC |
| | | | | CAGGGCACCCTGGTCACCGTCTCCTCAGGTGGTGGTGGTTCTGGCGGC |
| | | | | GGCGGCTCCGGTGGTGGTGGTTCTGACATCCAGATGACCCAGTCCCCC |
| | | | | AGCTCCCTGTCCGCCTCCGTGGGCGACAGAGTGACCATCACCTGCAGG |
| | | | | GCCTCCCAGAACGTGGACACCAACGTGGCCTGGTATCAGCAGAAGCCC |
| | | | | GGCCAGGCCCCTAAGTCCCTGATCTACTCCGCCACCTACCGGTACTCT |
| | | | | GACGTGCCTTCCCGGTTCTCCGGCTCCGCGTCCGGCACCGACTTCACC |
| | | | | CTGACCATCTCCAGCGTGCAGTCTGAGGACTTCGCCACGTACTACTGC |
| | | | | CAGCAGTACAACTCCTACCCTTACACCTTCGGCGGAGGGACCAAGCTG |
| | | | | GAAATCAAG |
| 377. | PM07F8H2 VH-VL × I2C | artificial | aa | QVQLVESGGGLVKPGESLRLSCAASGFTFSDYYMYWVRQAPGKGLEWV |
| | VH-VL | | | AIISDGGYYTYYSDIIKGRFTISRDNAKNSLYLQMNSLKAEDTAVYYC |
| | | | | ARGFPLLRHGAFDYWGQGTLVTVSSGGGGSGGGGSGGGGSDIQMTQSP |
| | | | | SSLSASVGDRVTITCRASQNVDTNVAWYQQKPGQAPKSLIYSATYRYS |
| | | | | DVPSRFSGSASGTDFTLTISSVQSEDFATYYCQQYNSYPYTFGGGTKL |
| | | | | EIKSGGGGSEVQLVESGGGLVQPGGSLKLSCAASGFTFNKYAMNWVRQ |
| | | | | APGKGLEWVARIRSKYNNYATYYADSVKDRFTISRDDSKNTAYLQMNN |
| | | | | LKTEDTAVYYCVRHGNFGNSYISYWAYWGQGTLVTVSSGGGGSGGGGS |
| | | | | GGGGSQTVVTQEPSLTVSPGGTVTLTCGSSTGAVTSGNYPNWVQQKPG |
| | | | | QAPRGLIGGTKFLAPGTPARFSGSLLGGKAALTLSGVQPEDEAEYYCV |
| | | | | LWYSNRWVFGGGTKLTVL |
| 378. | PM07F8H2 VH-VL × I2C | artificial | nt | CAGGTGCAGCTGGTCGAGTCTGGCGGCGGACTGGTGAAGCCTGGCGAG |
| | VH-VL | | | TCCCTGAGGCTGTCCTGTGCCGCCTCCGGCTTCACCTTCTCCGACTAC |
| | | | | TACATGTACTGGGTCCGCCAGGCCCCTGGGAAGGGGCTGGAATGGGTG |
| | | | | GCCATCATCTCCGACGGCGGCTACTACACCTACTACTCCGACATCATC |
| | | | | AAGGGCCGGTTCACCATCTCCCGGGACAACGCCAAGAACAGCCTGTAC |
| | | | | CTGCAGATGAACTCCCTGAAGGCCGAGGACACCGCCGTGTACTACTGC |
| | | | | GCCCGGGGCTTCCCTCTGCTGAGACACGGCGCCTTCGATTACTGGGGC |
| | | | | CAGGGCACCCTGGTCACCGTCTCCTCAGGTGGTGGTGGTTCTGGCGGC |
| | | | | GGCGGCTCCGGTGGTGGTGGTTCTGACATCCAGATGACCCAGTCCCCC |
| | | | | AGCTCCCTGTCCGCCTCCGTGGGCGACAGAGTGACCATCACCTGCAGG |
| | | | | GCCTCCCAGAACGTGGACACCAACGTGGCCTGGTATCAGCAGAAGCCC |
| | | | | GGCCAGGCCCCTAAGTCCCTGATCTACTCCGCCACCTACCGGTACTCT |
| | | | | GACGTGCCTTCCCGGTTCTCCGGCTCCGCGTCCGGCACCGACTTCACC |
| | | | | CTGACCATCTCCAGCGTGCAGTCTGAGGACTTCGCCACGTACTACTGC |
| | | | | CAGCAGTACAACTCCTACCCTTACACCTTCGGCGGAGGGACCAAGCTG |
| | | | | GAAATCAAGTCCGGAGGTGGTGGATCCGAGGTGCAGCTGGTCGAGTCT |
| | | | | GGAGGAGGATTGGTGCAGCCTGGAGGGTCATTGAAACTCTCATGTGCA |
| | | | | GCCTCTGGATTCACCTTCAATAAGTACGCCATGAACTGGGTCCGCCAG |
| | | | | GCTCCAGGAAAGGGTTTGGAATGGGTTGCTCGCATAAGAAGTAAATAT |
| | | | | AATAATTATGCAACATATTATGCCGATTCAGTGAAAGACAGGTTCACC |
| | | | | ATCTCCAGAGATGATTCAAAAAACACTGCCTATCTACAAATGAACAAC |
| | | | | TTGAAAACTGAGGACACTGCCGTGTACTACTGTGTGAGACATGGGAAC |
| | | | | TTCGGTAATAGCTACATATCCTACTGGGCTTACTGGGGCCAAGGGACT |
| | | | | CTGGTCACCGTCTCCTCAGGTGGTGGTGGTTCTGGCGGCGGCGGCTCC |
| | | | | GGTGGTGGTGGTTCTCAGACTGTTGTGACTCAGGAACCTTCACTCACC |
| | | | | GTATCACCTGGTGGAACAGTCACACTCACTTGTGGCTCCTCGACTGGG |
| | | | | GCTGTTACATCTGGCAACTACCCAAACTGGGTCCAACAAAAACCAGGT |
| | | | | CAGGCACCCCGTGGTCTAATAGGTGGGACTAAGTTCCTCGCCCCCGGT |
| | | | | ACTCCTGCCAGATTCTCAGGCTCCCTGCTTGGAGGCAAGGCTGCCCTC |
| | | | | ACCCTCTCAGGGGTACAGCCAGAGGATGAGGCAGAATATTACTGTGTT |
| | | | | CTATGGTACAGCAACCGCTGGGTGTTCGGTGGAGGAACCAAACTGACT |
| | | | | GTCCTA |
| 379. | PMH5A5-VH | artificial | aa | QVQLVQSGAEVKKPGASVKVSCKASGYNFKDTYMDWVKQTPEQGLEWM |
| | | | | GRIDPANGDSKYDPKFQGRVTITADTSTNTAYMELSSLRSEDTAVYYC |
| | | | | ARGGMIWYFDVWGQGTTVTVSS |
| 380. | PMH5A5-HCDR1 | artificial | aa | DTYMD |
| 381. | PMH5A5-HCDR2 | artificial | aa | RIDPANGDSKYDPKFQG |
| 382. | PMH5A5-HCDR3 | artificial | aa | GGMIWYFDV |
| 383. | PMH5A5-VH | artificial | nt | CAGGTGCAGCTGGTCCAGTCTGGGGCAGAGGTTAAGAAGCCAGGGGCC |
| | | | | TCAGTCAAGGTGTCCTGCAAAGCTTCTGGCTACAACTTTAAAGACACC |
| | | | | TATATGGACTGGGTGAAGCAGACGCCTGAACAGGGCCTGGAATGGATG |
| | | | | GGAAGGATTGATCCTGCGAATGGTGATAGTAAATATGACCCGAAATTC |
| | | | | CAGGGCAGGGTCACTATAACAGCAGACACATCCACCAACACAGCCTAC |
| | | | | ATGGAGCTCAGCAGCCTGAGATCTGAGGACACTGCCGTCTATTATTGT |
| | | | | GCTAGAGGCGGGATGATATGGTACTTCGATGTCTGGGGCCAAGGGACC |
| | | | | ACGGTCACCGTCTCCTCA |
| 384. | PMH5A5-VL | artificial | aa | EIVLTQSPATLSLSPGEKATLSCSASSSISSNYLHWYQQKPGLPPRLL |
| | | | | IYRTSNLASGIPDRFSGSGSGTDYTLTISRLEPEDVATYYCQQGSSLP |
| | | | | YTFGQGTKLEIK |
| 385. | PMH5A5-LCDR1 | artificial | aa | SASSSISSNYLH |
| 386. | PMH5A5-LCDR2 | artificial | aa | RTSNLAS |
| 387. | PMH5A5-LCDR3 | artificial | aa | QQGSSLPYT |
| 388. | PMH5A5-VL | artificial | nt | GAGATCGTGCTCACCCAGTCTCCAGCCACCCTGTCTCTATCTCCCGGG |
| | | | | GAGAAGGCCACTCTCTCCTGCAGTGCCAGCTCAAGTATAAGTTCCAAT |
| | | | | TACTTGCATTGGTATCAGCAGAAGCCAGGATTGCCCCCTAGACTCTTG |
| | | | | ATTTATAGGACATCCAATCTGGCTTCTGGAATCCCAGATCGCTTCAGT |
| | | | | GGCAGTGGGTCTGGGACCGATTACACTCTCACAATTAGCAGGCTGGAG |
| | | | | CCTGAAGATGTTGCCACTTACTACTGCCAGCAGGGTAGTAGTTTACCG |
| | | | | TACACGTTCGGACAAGGGACCAAGCTTGAGATCAAA |
| 389. | PMH5A5-VH-VL | artificial | aa | QVQLVQSGAEVKKPGASVKVSCKASGYNFKDTYMDWVKQTPEQGLEWM |
| | | | | GRIDPANGDSKYDPKFQGRVTITADTSTNTAYMELSSLRSEDTAVYYC |
| | | | | ARGGMIWYFDVWGQGTTVTVSSGGGGSGGGGSGGGGSEIVLTQSPATL |
| | | | | SLSPGEKATLSCSASSSISSNYLHWYQQKPGLPPRLLIYRTSNLASGI |
| | | | | PDRFSGSGSGTDYTLTISRLEPEDVATYYCQQGSSLPYTFGQGTKLEI |
| | | | | K |
| 390. | PMH5A5-VH-VL | artificial | nt | CAGGTGCAGCTGGTCCAGTCTGGGGCAGAGGTTAAGAAGCCAGGGGCC |
| | | | | TCAGTCAAGGTGTCCTGCAAAGCTTCTGGCTACAACTTTAAAGACACC |
| | | | | TATATGGACTGGGTGAAGCAGACGCCTGAACAGGGCCTGGAATGGATG |
| | | | | GGAAGGATTGATCCTGCGAATGGTGATAGTAAATATGACCCGAAATTC |
| | | | | CAGGGCAGGGTCACTATAACAGCAGACACATCCACCAACACAGCCTAC |
| | | | | ATGGAGCTCAGCAGCCTGAGATCTGAGGACACTGCCGTCTATTATTGT |
| | | | | GCTAGAGGCGGGATGATATGGTACTTCGATGTCTGGGGCCAAGGGACC |
| | | | | ACGGTCACCGTCTCCTCAGGTGGTGGTGGTTCTGGCGGCGGCGGCTCC |
| | | | | GGTGGTGGTGGTTCTGAGATCGTGCTCACCCAGTCTCCAGCCACCCTG |
| | | | | TCTCTATCTCCCGGGGAGAAGGCCACTCTCTCCTGCAGTGCCAGCTCA |
| | | | | AGTATAAGTTCCAATTACTTGCATTGGTATCAGCAGAAGCCAGGATTG |
| | | | | CCCCCTAGACTCTTGATTTATAGGACATCCAATCTGGCTTCTGGAATC |
| | | | | CCAGATCGCTTCAGTGGCAGTGGGTCTGGGACCGATTACACTCTCACA |
| | | | | ATTAGCAGGCTGGAGCCTGAAGATGTTGCCACTTACTACTGCCAGCAG |
| | | | | GGTAGTAGTTTACCGTACACGTTCGGACAAGGGACCAAGCTTGAGATC |
| | | | | AAA |
| 391. | PMH5A5 VH-VL × I2C | artificial | aa | QVQLVQSGAEVKKPGASVKVSCKASGYNFKDTYMDWVKQTPEQGLEWM |
| | VH-VL | | | GRIDPANGDSKYDPKFQGRVTITADTSTNTAYMELSSLRSEDTAVYYC |
| | | | | ARGGMIWYFDVWGQGTTVTVSSGGGGSGGGGSGGGGSEIVLTQSPATL |
| | | | | SLSPGEKATLSCSASSSISSNYLHWYQQKPGLPPRLLIYRTSNLASGI |
| | | | | PDRFSGSGSGTDYTLTISRLEPEDVATYYCQQGSSLPYTFGQGTKLEI |
| | | | | KKSGGGGSEVQLVESGGGLVQPGGSLKLSCAASGFTFNKYAMNWVRQA |
| | | | | PGKGLEWVARIRSKYNNYATYYADSVKDRFTISRDDSKNTAYLQMNNL |
| | | | | KTEDTAVYYCVRHGNFGNSYISYWAYWGQGTLVTVSSGGGGSGGGGSG |
| | | | | GGGSQTVVTQEPSLTVSPGGTVTLTCGSSTGAVTSGNYPNWVQQKPGQ |
| | | | | APRGLIGGTKFLAPGTPARFSGSLLGGKAALTLSGVQPEDEAEYYCVL |
| | | | | WYSNRWVFGGGTKLTVL |
| 392. | PMH5A5 VH-VL × I2C | artificial | nt | CAGGTGCAGCTGGTCCAGTCTGGGGCAGAGGTTAAGAAGCCAGGGGCC |
| | VH-VL | | | TCAGTCAAGGTGTCCTGCAAAGCTTCTGGCTACAACTTTAAAGACACC |
| | | | | TATATGGACTGGGTGAAGCAGACGCCTGAACAGGGCCTGGAATGGATG |
| | | | | GGAAGGATTGATCCTGCGAATGGTGATAGTAAATATGACCCGAAATTC |
| | | | | CAGGGCAGGGTCACTATAACAGCAGACACATCCACCAACACAGCCTAC |
| | | | | ATGGAGCTCAGCAGCCTGAGATCTGAGGACACTGCCGTCTATTATTGT |
| | | | | GCTAGAGGCGGGATGATATGGTACTTCGATGTCTGGGGCCAAGGGACC |
| | | | | ACGGTCACCGTCTCCTCAGGTGGTGGTGGTTCTGGCGGCGGCGGCTCC |
| | | | | GGTGGTGGTGGTTCTGAGATCGTGCTCACCCAGTCTCCAGCCACCCTG |
| | | | | TCTCTATCTCCCGGGGAGAAGGCCACTCTCTCCTGCAGTGCCAGCTCA |
| | | | | AGTATAAGTTCCAATTACTTGCATTGGTATCAGCAGAAGCCAGGATTG |
| | | | | CCCCCTAGACTCTTGATTTATAGGACATCCAATCTGGCTTCTGGAATC |
| | | | | CCAGATCGCTTCAGTGGCAGTGGGTCTGGGACCGATTACACTCTCACA |
| | | | | ATTAGCAGGCTGGAGCCTGAAGATGTTGCCACTTACTACTGCCAGCAG |
| | | | | GGTAGTAGTTTACCGTACACGTTCGGACAAGGGACCAAGCTTGAGATC |
| | | | | AAATCCGGAGGTGGTGGATCCGAGGTGCAGCTGGTCGAGTCTGGAGGA |
| | | | | GGATTGGTGCAGCCTGGAGGGTCATTGAAACTCTCATGTGCAGCCTCT |
| | | | | GGATTCACCTTCAATAAGTACGCCATGAACTGGGTCCGCCAGGCTCCA |
| | | | | GGAAAGGGTTTGGAATGGGTTGCTCGCATAAGAAGTAAATATAATAAT |
| | | | | TATGCAACATATTATGCCGATTCAGTGAAAGACAGGTTCACCATCTCC |
| | | | | AGAGATGATTCAAAAAACACTGCCTATCTACAAATGAACAACTTGAAA |
| | | | | ACTGAGGACACTGCCGTGTACTACTGTGTGAGACATGGGAACTTCGGT |
| | | | | AATAGCTACATATCCTACTGGGCTTACTGGGGCCAAGGGACTCTGGTC |
| | | | | ACCGTCTCCTCAGGTGGTGGTGGTTCTGGCGGCGGCGGCTCCGGTGGT |
| | | | | GGTGGTTCTCAGACTGTTGTGACTCAGGAACCTTCACTCACCGTATCA |
| | | | | CCTGGTGGAACAGTCACACTCACTTGTGGCTCCTCGACTGGGGCTGTT |
| | | | | ACATCTGGCAACTACCCAAACTGGGTCCAACAAAAACCAGGTCAGGCA |
| | | | | CCCCGTGGTCTAATAGGTGGGACTAAGTTCCTCGCCCCCGGTACTCCT |
| | | | | GCCAGATTCTCAGGCTCCCTGCTTGGAGGCAAGGCTGCCCTCACCCTC |
| | | | | TCAGGGGTACAGCCAGAGGATGAGGCAGAATATTACTGTGTTCTATGG |
| | | | | TACAGCAACCGCTGGGTGTTCGGTGGAGGAACCAAACTGACTGTCCTA |
| 393. | PMH8A5-VH | artificial | aa | QVQLVQSGAEVVKPGASVKLSCKASGFTITDTYMDWVRQAPGQGLEWI |
| | | | | GRIDPANGDSKYDPKFQGRATITPDTSTNTVYMELSSLRSEDTAVYYC |
| | | | | ARGGMIWYFDVWGQGTTVTVSS |
| 394. | PMH8A5-HCDR1 | artificial | aa | DTYMD |
| 395. | PMH8A5-HCDR2 | artificial | aa | RIDPANGDSKYDPKFQG |
| 396. | PMH8A5-HCDR3 | artificial | aa | GGMIWYFDV |
| 397. | PMH8A5-VH | artificial | nt | CAGGTGCAGCTGGTCCAGTCTGGGGCAGAGGTTGTGAAGCCAGGGGCC |
| | | | | TCAGTCAAGTTGTCCTGCAAAGCTTCTGGCTTCACCATTACAGACACC |
| | | | | TATATGGACTGGGTGAGGCAGGCGCCTGGACAGGGCCTGGAATGGATT |
| | | | | GGAAGGATTGATCCTGCGAATGGTGATAGTAAATATGACCCGAAATTC |
| | | | | CAGGGCAGGGCCACTATAACACCAGACACATCCACCAACACAGTCTAC |
| | | | | ATGGAGCTCAGCAGCCTGAGATCTGAGGACACTGCCGTCTATTATTGT |
| | | | | GCTAGAGGCGGGATGATATGGTACTTCGATGTCTGGGGCCAAGGGACC |
| | | | | ACGGTCACCGTCTCCTCA |
| 398. | PMH8A5-VL | artificial | aa | EIVLTQSPATLSLSPGEKATLSCSASSSISSNYLHWYQQKPGLPPRLL |
| | | | | IYRTSNLASGIPDRFSGSGSGTDYTLTISRLEPEDVATYYCQQGSSLP |
| | | | | YTFGQGTKLEIK |
| 399. | PMH8A5-LCDR1 | artificial | aa | SASSSISSNYLH |
| 400. | PMH8A5-LCDR2 | artificial | aa | RTSNLAS |
| 401. | PMH8A5-LCDR3 | artificial | aa | QQGSSLPYT |
| 402. | PMH8A5-VL | artificial | nt | GAGATCGTGCTCACCCAGTCTCCAGCCACCCTGTCTCTATCTCCCGGG |
| | | | | GAGAAGGCCACTCTCTCCTGCAGTGCCAGCTCAAGTATAAGTTCCAAT |
| | | | | TACTTGCATTGGTATCAGCAGAAGCCAGGATTGCCCCCTAGACTCTTG |
| | | | | ATTTATAGGACATCCAATCTGGCTTCTGGAATCCCAGATCGCTTCAGT |
| | | | | GGCAGTGGGTCTGGGACCGATTACACTCTCACAATTAGCAGGCTGGAG |
| | | | | CCTGAAGATGTTGCCACTTACTACTGCCAGCAGGGTAGTAGTTTACCG |
| | | | | TACACGTTCGGACAAGGGACCAAGCTTGAGATCAAA |
| 403. | PMH8A5-VH-VL | artificial | aa | QVQLVQSGAEVVKPGASVKLSCKASGFTITDTYMDWVRQAPGQGLEWI |
| | | | | GRIDPANGDSKYDPKFQGRATITPDTSTNTVYMELSSLRSEDTAVYYC |
| | | | | ARGGMIWYFDVWGQGTTVTVSSGGGGSGGGGSGGGGSEIVLTQSPATL |
| | | | | SLSPGEKATLSCSASSSISSNYLHWYQQKPGLPPRLLIYRTSNLASGI |
| | | | | PDRFSGSGSGTDYTLTISRLEPEDVATYYCQQGSSLPYTFGQGTKLEI |
| | | | | K |
| 404. | PMH8A5-VH-VL | artificial | nt | CAGGTGCAGCTGGTCCAGTCTGGGGCAGAGGTTGTGAAGCCAGGGGCC |
| | | | | TCAGTCAAGTTGTCCTGCAAAGCTTCTGGCTTCACCATTACAGACACC |
| | | | | TATATGGACTGGGTGAGGCAGGCGCCTGGACAGGGCCTGGAATGGATT |
| | | | | GGAAGGATTGATCCTGCGAATGGTGATAGTAAATATGACCCGAAATTC |
| | | | | CAGGGCAGGGCCACTATAACACCAGACACATCCACCAACACAGTCTAC |
| | | | | ATGGAGCTCAGCAGCCTGAGATCTGAGGACACTGCCGTCTATTATTGT |
| | | | | GCTAGAGGCGGGATGATATGGTACTTCGATGTCTGGGGCCAAGGGACC |
| | | | | ACGGTCACCGTCTCCTCAGGTGGTGGTGGTTCTGGCGGCGGCGGCTCC |
| | | | | GGTGGTGGTGGTTCTGAGATCGTGCTCACCCAGTCTCCAGCCACCCTG |
| | | | | TCTCTATCTCCCGGGGAGAAGGCCACTCTCTCCTGCAGTGCCAGCTCA |
| | | | | AGTATAAGTTCCAATTACTTGCATTGGTATCAGCAGAAGCCAGGATTG |
| | | | | CCCCCTAGACTCTTGATTTATAGGACATCCAATCTGGCTTCTGGAATC |
| | | | | CCAGATCGCTTCAGTGGCAGTGGGTCTGGGACCGATTACACTCTCACA |
| | | | | ATTAGCAGGCTGGAGCCTGAAGATGTTGCCACTTACTACTGCCAGCAG |
| | | | | GGTAGTAGTTTACCGTACACGTTCGGACAAGGGACCAAGCTTGAGATC |
| | | | | AAA |
| 405. | PMH8A5 VH-VL × I2C | artificial | aa | QVQLVQSGAEVVKPGASVKLSCKASGFTITDTYMDWVRQAPGQGLEWI |
| | VH-VL | | | GRIDPANGDSKYDPKFQGRATITPDTSTNTVYMELSSLRSEDTAVYYC |
| | | | | ARGGMIWYFDVWGQGTTVTVSSGGGGSGGGGSGGGGSEIVLTQSPATL |
| | | | | SLSPGEKATLSCSASSSISSNYLHWYQQKPGLPPRLLIYRTSNLASGI |
| | | | | PDRFSGSGSGTDYTLTISRLEPEDVATYYCQQGSSLPYTFGQGTKLEI |
| | | | | KKSGGGGSEVQLVESGGGLVQPGGSLKLSCAASGFTFNKYAMNWVRQA |
| | | | | PGKGLEWVARIRSKYNNYATYYADSVKDRFTISRDDSKNTAYLQMNNL |
| | | | | KTEDTAVYYCVRHGNFGNSYISYWAYWGQGTLVTVSSGGGGSGGGGSG |
| | | | | GGGSQTVVTQEPSLTVSPGGTVTLTCGSSTGAVTSGNYPNWVQQKPGQ |
| | | | | APRGLIGGTKFLAPGTPARFSGSLLGGKAALTLSGVQPEDEAEYYCVL |
| | | | | WYSNRWVFGGGTKLTVL |
| 406. | PMH8A5 VH-VL × I2C | artificial | nt | CAGGTGCAGCTGGTCCAGTCTGGGGCAGAGGTTGTGAAGCCAGGGGCC |
| | VH-VL | | | TCAGTCAAGTTGTCCTGCAAAGCTTCTGGCTTCACCATTACAGACACC |
| | | | | TATATGGACTGGGTGAGGCAGGCGCCTGGACAGGGCCTGGAATGGATT |
| | | | | GGAAGGATTGATCCTGCGAATGGTGATAGTAAATATGACCCGAAATTC |
| | | | | CAGGGCAGGGCCACTATAACACCAGACACATCCACCAACACAGTCTAC |
| | | | | ATGGAGCTCAGCAGCCTGAGATCTGAGGACACTGCCGTCTATTATTGT |
| | | | | GCTAGAGGCGGGATGATATGGTACTTCGATGTCTGGGGCCAAGGGACC |
| | | | | ACGGTCACCGTCTCCTCAGGTGGTGGTGGTTCTGGCGGCGGCGGCTCC |
| | | | | GGTGGTGGTGGTTCTGAGATCGTGCTCACCCAGTCTCCAGCCACCCTG |
| | | | | TCTCTATCTCCCGGGGAGAAGGCCACTCTCTCCTGCAGTGCCAGCTCA |
| | | | | AGTATAAGTTCCAATTACTTGCATTGGTATCAGCAGAAGCCAGGATTG |
| | | | | CCCCCTAGACTCTTGATTTATAGGACATCCAATCTGGCTTCTGGAATC |
| | | | | CCAGATCGCTTCAGTGGCAGTGGGTCTGGGACCGATTACACTCTCACA |
| | | | | ATTAGCAGGCTGGAGCCTGAAGATGTTGCCACTTACTACTGCCAGCAG |
| | | | | GGTAGTAGTTTACCGTACACGTTCGGACAAGGGACCAAGCTTGAGATC |
| | | | | AAATCCGGAGGTGGTGGATCCGAGGTGCAGCTGGTCGAGTCTGGAGGA |
| | | | | GGATTGGTGCAGCCTGGAGGGTCATTGAAACTCTCATGTGCAGCCTCT |
| | | | | GGATTCACCTTCAATAAGTACGCCATGAACTGGGTCCGCCAGGCTCCA |
| | | | | GGAAAGGGTTTGGAATGGGTTGCTCGCATAAGAAGTAAATATAATAAT |
| | | | | TATGCAACATATTATGCCGATTCAGTGAAAGACAGGTTCACCATCTCC |
| | | | | AGAGATGATTCAAAAAACACTGCCTATCTACAAATGAACAACTTGAAA |
| | | | | ACTGAGGACACTGCCGTGTACTACTGTGTGAGACATGGGAACTTCGGT |
| | | | | AATAGCTACATATCCTACTGGGCTTACTGGGGCCAAGGGACTCTGGTC |
| | | | | ACCGTCTCCTCAGGTGGTGGTGGTTCTGGCGGCGGCGGCTCCGGTGGT |
| | | | | GGTGGTTCTCAGACTGTTGTGACTCAGGAACCTTCACTCACCGTATCA |
| | | | | CCTGGTGGAACAGTCACACTCACTTGTGGCTCCTCGACTGGGGCTGTT |
| | | | | ACATCTGGCAACTACCCAAACTGGGTCCAACAAAAACCAGGTCAGGCA |
| | | | | CCCCGTGGTCTAATAGGTGGGACTAAGTTCCTCGCCCCCGGTACTCCT |
| | | | | GCCAGATTCTCAGGCTCCCTGCTTGGAGGCAAGGCTGCCCTCACCCTC |
| | | | | TCAGGGGTACAGCCAGAGGATGAGGCAGAATATTACTGTGTTCTATGG |
| | | | | TACAGCAACCGCTGGGTGTTCGGTGGAGGAACCAAACTGACTGTCCT |
| 407. | PMH5B1-VH | artificial | aa | QVQLVQSGAEVKKPGASVKVSCKASGYNFKDTYMDWVKQTPEQGLEWM |
| | | | | GRIDPANGDSKYDPKFQGRVTITADTSTNTAYMELSSLRSEDTAVYYC |
| | | | | ARGGMIWYFDVWGQGTTVTVSS |
| 408. | PMH5B1-HCDR1 | artificial | aa | DTYMD |
| 409. | PMH5B1-HCDR2 | artificial | aa | RIDPANGDSKYDPKFQG |
| 410. | PMH5B1-HCDR3 | artificial | aa | GGMIWYFDV |
| 411. | PMH5B1-VH | artificial | nt | CAGGTGCAGCTGGTCCAGTCTGGGGCAGAGGTTAAGAAGCCAGGGGCC |
| | | | | TCAGTCAAGGTGTCCTGCAAAGCTTCTGGCTACAACTTTAAAGACACC |
| | | | | TATATGGACTGGGTGAAGCAGACGCCTGAACAGGGCCTGGAATGGATG |
| | | | | GGAAGGATTGATCCTGCGAATGGTGATAGTAAATATGACCCGAAATTC |
| | | | | CAGGGCAGGGTCACTATAACAGCAGACACATCCACCAACACAGCCTAC |
| | | | | ATGGAGCTCAGCAGCCTGAGATCTGAGGACACTGCCGTCTATTATTGT |
| | | | | GCTAGAGGCGGGATGATATGGTACTTCGATGTCTGGGGCCAAGGGACC |
| | | | | ACGGTCACCGTCTCCTCA |
| 412. | PMH5B1-VL | artificial | aa | EIVLTQSPATLSLSPGERATLSCSASSSISSNYLHWYQQKPGLPPRLL |
| | | | | IYRTSNLASGIPDRFSGSGSGTDFTLTISRMEAEDFAVYYCQQGSSLP |
| | | | | YTFGQGTKLEIK |
| 413. | PMH5B1-LCDR1 | artificial | aa | SASSSISSNYLH |
| 414. | PMH5B1-LCDR2 | artificial | aa | RTSNLAS |
| 415. | PMH5B1-LCDR3 | artificial | aa | QQGSSLPYT |
| 416. | PMH5B1-VL | artificial | nt | GAGATCGTGCTCACCCAGTCTCCAGCCACCCTGTCTCTATCTCCCGGG |
| | | | | GAGAGGGCCACTCTCTCCTGCAGTGCCAGCTCAAGTATAAGTTCCAAT |
| | | | | TACTTGCATTGGTATCAGCAGAAGCCAGGATTGCCCCCTAGACTCTTG |
| | | | | ATTTATAGGACATCCAATCTGGCTTCTGGAATCCCAGATCGCTTCAGT |
| | | | | GGCAGTGGGTCTGGGACCGATTTCACTCTCACAATTAGCAGGATGGAG |
| | | | | GCTGAAGATTTTGCCGTTTACTACTGCCAGCAGGGTAGTAGTTTACCG |
| | | | | TACACGTTCGGACAAGGGACCAAGCTTGAGATCAAA |
| 417. | PMH5B1-VH-VL | artificial | aa | QVQLVQSGAEVKKPGASVKVSCKASGYNFKDTYMDWVKQTPEQGLEWM |
| | | | | GRIDPANGDSKYDPKFQGRVTITADTSTNTAYMELSSLRSEDTAVYYC |
| | | | | ARGGMIWYFDVWGQGTTVTVSSGGGGSGGGGSGGGGSEIVLTQSPATL |
| | | | | SLSPGERATLSCSASSSISSNYLHWYQQKPGLPPRLLIYRTSNLASGI |
| | | | | PDRFSGSGSGTDFTLTISRMEAEDFAVYYCQQGSSLPYTFGQGTKLEI |
| | | | | K |
| 418. | PMH5B1-VH-VL | artificial | nt | CAGGTGCAGCTGGTCCAGTCTGGGGCAGAGGTTAAGAAGCCAGGGGCC |
| | | | | TCAGTCAAGGTGTCCTGCAAAGCTTCTGGCTACAACTTTAAAGACACC |
| | | | | TATATGGACTGGGTGAAGCAGACGCCTGAACAGGGCCTGGAATGGATG |
| | | | | GGAAGGATTGATCCTGCGAATGGTGATAGTAAATATGACCCGAAATTC |
| | | | | CAGGGCAGGGTCACTATAACAGCAGACACATCCACCAACACAGCCTAC |
| | | | | ATGGAGCTCAGCAGCCTGAGATCTGAGGACACTGCCGTCTATTATTGT |
| | | | | GCTAGAGGCGGGATGATATGGTACTTCGATGTCTGGGGCCAAGGGACC |
| | | | | ACGGTCACCGTCTCCTCAGGTGGTGGTGGTTCTGGCGGCGGCGGCTCC |
| | | | | GGTGGTGGTGGTTCTGAGATCGTGCTCACCCAGTCTCCAGCCACCCTG |
| | | | | TCTCTATCTCCCGGGGAGAGGGCCACTCTCTCCTGCAGTGCCAGCTCA |
| | | | | AGTATAAGTTCCAATTACTTGCATTGGTATCAGCAGAAGCCAGGATTG |
| | | | | CCCCCTAGACTCTTGATTTATAGGACATCCAATCTGGCTTCTGGAATC |
| | | | | CCAGATCGCTTCAGTGGCAGTGGGTCTGGGACCGATTTCACTCTCACA |
| | | | | ATTAGCAGGATGGAGGCTGAAGATTTTGCCGTTTACTACTGCCAGCAG |
| | | | | GGTAGTAGTTTACCGTACACGTTCGGACAAGGGACCAAGCTTGAGATC |
| | | | | AAA |
| 419. | PMH5B1 VH-VL × I2C | artificial | aa | QVQLVQSGAEVKKPGASVKVSCKASGYNFKDTYMDWVKQTPEQGLEWM |
| | VH-VL | | | GRIDPANGDSKYDPKFQGRVTITADTSTNTAYMELSSLRSEDTAVYYC |
| | | | | ARGGMIWYFDVWGQGTTVTVSSGGGGSGGGGSGGGGSEIVLTQSPATL |
| | | | | SLSPGERATLSCSASSSISSNYLHWYQQKPGLPPRLLIYRTSNLASGI |
| | | | | PDRFSGSGSGTDFTLTISRMEAEDFAVYYCQQGSSLPYTFGQGTKLEI |
| | | | | KSGGGGSEVQLVESGGGLVQPGGSLKLSCAASGFTFNKYAMNWVRQAP |
| | | | | GKGLEWVARIRSKYNNYATYYADSVKDRFTISRDDSKNTAYLQMNNLK |
| | | | | TEDTAVYYCVRHGNFGNSYISYWAYWGQGTLVTVSSGGGGSGGGGSGG |
| | | | | GGSQTVVTQEPSLTVSPGGTVTLTCGSSTGAVTSGNYPNWVQQKPGQA |
| | | | | PRGLIGGTKFLAPGTPARFSGSLLGGKAALTLSGVQPEDEAEYYCVLW |
| | | | | YSNRWVFGGGTKLTVL |
| 420. | PMH5B1 VH-VL × I2C | artificial | nt | CAGGTGCAGCTGGTCCAGTCTGGGGCAGAGGTTAAGAAGCCAGGGGCC |
| | VH-VL | | | TCAGTCAAGGTGTCCTGCAAAGCTTCTGGCTACAACTTTAAAGACACC |
| | | | | TATATGGACTGGGTGAAGCAGACGCCTGAACAGGGCCTGGAATGGATG |
| | | | | GGAAGGATTGATCCTGCGAATGGTGATAGTAAATATGACCCGAAATTC |
| | | | | CAGGGCAGGGTCACTATAACAGCAGACACATCCACCAACACAGCCTAC |
| | | | | ATGGAGCTCAGCAGCCTGAGATCTGAGGACACTGCCGTCTATTATTGT |
| | | | | GCTAGAGGCGGGATGATATGGTACTTCGATGTCTGGGGCCAAGGGACC |
| | | | | ACGGTCACCGTCTCCTCAGGTGGTGGTGGTTCTGGCGGCGGCGGCTCC |
| | | | | GGTGGTGGTGGTTCTGAGATCGTGCTCACCCAGTCTCCAGCCACCCTG |
| | | | | TCTCTATCTCCCGGGGAGAGGGCCACTCTCTCCTGCAGTGCCAGCTCA |
| | | | | AGTATAAGTTCCAATTACTTGCATTGGTATCAGCAGAAGCCAGGATTG |
| | | | | CCCCCTAGACTCTTGATTTATAGGACATCCAATCTGGCTTCTGGAATC |
| | | | | CCAGATCGCTTCAGTGGCAGTGGGTCTGGGACCGATTTCACTCTCACA |
| | | | | ATTAGCAGGATGGAGGCTGAAGATTTTGCCGTTTACTACTGCCAGCAG |
| | | | | GGTAGTAGTTTACCGTACACGTTCGGACAAGGGACCAAGCTTGAGATC |
| | | | | AAATCCGGAGGTGGTGGATCCGAGGTGCAGCTGGTCGAGTCTGGAGGA |
| | | | | GGATTGGTGCAGCCTGGAGGGTCATTGAAACTCTCATGTGCAGCCTCT |
| | | | | GGATTCACCTTCAATAAGTACGCCATGAACTGGGTCCGCCAGGCTCCA |
| | | | | GGAAAGGGTTTGGAATGGGTTGCTCGCATAAGAAGTAAATATAATAAT |
| | | | | TATGCAACATATTATGCCGATTCAGTGAAAGACAGGTTCACCATCTCC |
| | | | | AGAGATGATTCAAAAAACACTGCCTATCTACAAATGAACAACTTGAAA |
| | | | | ACTGAGGACACTGCCGTGTACTACTGTGTGAGACATGGGAACTTCGGT |
| | | | | AATAGCTACATATCCTACTGGGCTTACTGGGGCCAAGGGACTCTGGTC |
| | | | | ACCGTCTCCTCAGGTGGTGGTGGTTCTGGCGGCGGCGGCTCCGGTGGT |
| | | | | GGTGGTTCTCAGACTGTTGTGACTCAGGAACCTTCACTCACCGTATCA |
| | | | | CCTGGTGGAACAGTCACACTCACTTGTGGCTCCTCGACTGGGGCTGTT |
| | | | | ACATCTGGCAACTACCCAAACTGGGTCCAACAAAAACCAGGTCAGGCA |
| | | | | CCCCGTGGTCTAATAGGTGGGACTAAGTTCCTCGCCCCCGGTACTCCT |
| | | | | GCCAGATTCTCAGGCTCCCTGCTTGGAGGCAAGGCTGCCCTCACCCTC |
| | | | | TCAGGGGTACAGCCAGAGGATGAGGCAGAATATTACTGTGTTCTATGG |
| | | | | TACAGCAACCGCTGGGTGTTCGGTGGAGGAACCAAACTGACTGTCCT |
| 421. | PMH8B1-VH | artificial | aa | QVQLVQSGAEVVKPGASVKLSCKASGFTITDTYMDWVRQAPGQGLEWI |
| | | | | GRIDPANGDSKYDPKFQGRATITPDTSTNTVYMELSSLRSEDTAVYYC |
| | | | | ARGGMIWYFDVWGQGTTVTVSS |
| 422. | PMH8B1-HCDR1 | artificial | aa | DTYMD |
| 423. | PMH8B1-HCDR2 | artificial | aa | RIDPANGDSKYDPKFQG |
| 424. | PMH8B1-HCDR3 | artificial | aa | GGMIWYFDV |
| 425. | PMH8B1-VH | artificial | nt | CAGGTGCAGCTGGTCCAGTCTGGGGCAGAGGTTGTGAAGCCAGGGGCC |
| | | | | TCAGTCAAGTTGTCCTGCAAAGCTTCTGGCTTCACCATTACAGACACC |
| | | | | TATATGGACTGGGTGAGGCAGGCGCCTGGACAGGGCCTGGAATGGATT |
| | | | | GGAAGGATTGATCCTGCGAATGGTGATAGTAAATATGACCCGAAATTC |
| | | | | CAGGGCAGGGCCACTATAACACCAGACACATCCACCAACACAGTCTAC |
| | | | | ATGGAGCTCAGCAGCCTGAGATCTGAGGACACTGCCGTCTATTATTGT |
| | | | | GCTAGAGGCGGGATGATATGGTACTTCGATGTCTGGGGCCAAGGGACC |
| | | | | ACGGTCACCGTCTCCTCA |
| 426. | PMH8B1-VL | artificial | aa | EIVLTQSPATLSLSPGERATLSCSASSSISSNYLHWYQQKPGLPPRLL |
| | | | | IYRTSNLASGIPDRFSGSGSGTDFTLTISRMEAEDFAVYYCQQGSSLP |
| | | | | YTFGQGTKLEIK |
| 427. | PMH8B1-LCDR1 | artificial | aa | SASSSISSNYLH |
| 428. | PMH8B1-LCDR2 | artificial | aa | RTSNLAS |
| 429. | PMH8B1-LCDR3 | artificial | aa | QQGSSLPYT |
| 430. | PMH8B1-VL | artificial | nt | GAGATCGTGCTCACCCAGTCTCCAGCCACCCTGTCTCTATCTCCCGGG |
| | | | | GAGAGGGCCACTCTCTCCTGCAGTGCCAGCTCAAGTATAAGTTCCAAT |
| | | | | TACTTGCATTGGTATCAGCAGAAGCCAGGATTGCCCCCTAGACTCTTG |
| | | | | ATTTATAGGACATCCAATCTGGCTTCTGGAATCCCAGATCGCTTCAGT |
| | | | | GGCAGTGGGTCTGGGACCGATTTCACTCTCACAATTAGCAGGATGGAG |
| | | | | GCTGAAGATTTTGCCGTTTACTACTGCCAGCAGGGTAGTAGTTTACCG |
| | | | | TACACGTTCGGACAAGGGACCAAGCTTGAGATCAAA |
| 431. | PMH8B1-VH-VL | artificial | aa | QVQLVQSGAEVVKPGASVKLSCKASGFTITDTYMDWVRQAPGQGLEWI |
| | | | | GRIDPANGDSKYDPKFQGRATITPDTSTNTVYMELSSLRSEDTAVYYC |
| | | | | ARGGMIWYFDVWGQGTTVTVSSGGGGSGGGGSGGGGSEIVLTQSPATL |
| | | | | SLSPGERATLSCSASSSISSNYLHWYQQKPGLPPRLLIYRTSNLASGI |
| | | | | PDRFSGSGSGTDFTLTISRMEAEDFAVYYCQQGSSLPYTFGQGTKLEI |
| | | | | K |
| 432. | PMH8B1-VH-VL | artificial | nt | CAGGTGCAGCTGGTCCAGTCTGGGGCAGAGGTTGTGAAGCCAGGGGCC |
| | | | | TCAGTCAAGTTGTCCTGCAAAGCTTCTGGCTTCACCATTACAGACACC |
| | | | | TATATGGACTGGGTGAGGCAGGCGCCTGGACAGGGCCTGGAATGGATT |
| | | | | GGAAGGATTGATCCTGCGAATGGTGATAGTAAATATGACCCGAAATTC |
| | | | | CAGGGCAGGGCCACTATAACACCAGACACATCCACCAACACAGTCTAC |
| | | | | ATGGAGCTCAGCAGCCTGAGATCTGAGGACACTGCCGTCTATTATTGT |
| | | | | GCTAGAGGCGGGATGATATGGTACTTCGATGTCTGGGGCCAAGGGACC |
| | | | | ACGGTCACCGTCTCCTCAGGTGGTGGTGGTTCTGGCGGCGGCGGCTCC |
| | | | | GGTGGTGGTGGTTCTGAGATCGTGCTCACCCAGTCTCCAGCCACCCTG |
| | | | | TCTCTATCTCCCGGGGAGAGGGCCACTCTCTCCTGCAGTGCCAGCTCA |
| | | | | AGTATAAGTTCCAATTACTTGCATTGGTATCAGCAGAAGCCAGGATTG |
| | | | | CCCCCTAGACTCTTGATTTATAGGACATCCAATCTGGCTTCTGGAATC |
| | | | | CCAGATCGCTTCAGTGGCAGTGGGTCTGGGACCGATTTCACTCTCACA |
| | | | | ATTAGCAGGATGGAGGCTGAAGATTTTGCCGTTTACTACTGCCAGCAG |
| | | | | GGTAGTAGTTTACCGTACACGTTCGGACAAGGGACCAAGCTTGAGATC |
| | | | | AAA |
| 433. | PMH8B1 VH-VL × I2C | artificial | aa | QVQLVQSGAEVVKPGASVKLSCKASGFTITDTYMDWVRQAPGQGLEWI |
| | VH-VL | | | GRIDPANGDSKYDPKFQGRATITPDTSTNTVYMELSSLRSEDTAVYYC |
| | | | | ARGGMIWYFDVWGQGTTVTVSSGGGGSGGGGSGGGGSEIVLTQSPATL |
| | | | | SLSPGERATLSCSASSSISSNYLHWYQQKPGLPPRLLIYRTSNLASGI |
| | | | | PDRFSGSGSGTDFTLTISRMEAEDFAVYYCQQGSSLPYTFGQGTKLEI |
| | | | | KSGGGGSEVQLVESGGGLVQPGGSLKLSCAASGFTFNKYAMNWVRQAP |
| | | | | GKGLEWVARIRSKYNNYATYYADSVKDRFTISRDDSKNTAYLQMNNLK |
| | | | | TEDTAVYYCVRHGNFGNSYISYWAYWGQGTLVTVSSGGGGSGGGGSGG |
| | | | | GGSQTVVTQEPSLTVSPGGTVTLTCGSSTGAVTSGNYPNWVQQKPGQA |
| | | | | PRGLIGGTKFLAPGTPARFSGSLLGGKAALTLSGVQPEDEAEYYCVLW |
| | | | | YSNRWVFGGGTKLTVL |
| 434. | PMH8B1 VH-VL × I2C | artificial | nt | CAGGTGCAGCTGGTCCAGTCTGGGGCAGAGGTTGTGAAGCCAGGGGCC |
| | VH-VL | | | TCAGTCAAGTTGTCCTGCAAAGCTTCTGGCTTCACCATTACAGACACC |
| | | | | TATATGGACTGGGTGAGGCAGGCGCCTGGACAGGGCCTGGAATGGATT |
| | | | | GGAAGGATTGATCCTGCGAATGGTGATAGTAAATATGACCCGAAATTC |
| | | | | CAGGGCAGGGCCACTATAACACCAGACACATCCACCAACACAGTCTAC |
| | | | | ATGGAGCTCAGCAGCCTGAGATCTGAGGACACTGCCGTCTATTATTGT |
| | | | | GCTAGAGGCGGGATGATATGGTACTTCGATGTCTGGGGCCAAGGGACC |
| | | | | ACGGTCACCGTCTCCTCAGGTGGTGGTGGTTCTGGCGGCGGCGGCTCC |
| | | | | GGTGGTGGTGGTTCTGAGATCGTGCTCACCCAGTCTCCAGCCACCCTG |
| | | | | TCTCTATCTCCCGGGGAGAGGGCCACTCTCTCCTGCAGTGCCAGCTCA |
| | | | | AGTATAAGTTCCAATTACTTGCATTGGTATCAGCAGAAGCCAGGATTG |
| | | | | CCCCCTAGACTCTTGATTTATAGGACATCCAATCTGGCTTCTGGAATC |
| | | | | CCAGATCGCTTCAGTGGCAGTGGGTCTGGGACCGATTTCACTCTCACA |
| | | | | ATTAGCAGGATGGAGGCTGAAGATTTTGCCGTTTACTACTGCCAGCAG |
| | | | | GGTAGTAGTTTACCGTACACGTTCGGACAAGGGACCAAGCTTGAGATC |
| | | | | AAATCCGGAGGTGGTGGATCCGAGGTGCAGCTGGTCGAGTCTGGAGGA |
| | | | | GGATTGGTGCAGCCTGGAGGGTCATTGAAACTCTCATGTGCAGCCTCT |
| | | | | GGATTCACCTTCAATAAGTACGCCATGAACTGGGTCCGCCAGGCTCCA |
| | | | | GGAAAGGGTTTGGAATGGGTTGCTCGCATAAGAAGTAAATATAATAAT |
| | | | | TATGCAACATATTATGCCGATTCAGTGAAAGACAGGTTCACCATCTCC |
| | | | | AGAGATGATTCAAAAAACACTGCCTATCTACAAATGAACAACTTGAAA |
| | | | | ACTGAGGACACTGCCGTGTACTACTGTGTGAGACATGGGAACTTCGGT |
| | | | | AATAGCTACATATCCTACTGGGCTTACTGGGGCCAAGGGACTCTGGTC |
| | | | | ACCGTCTCCTCAGGTGGTGGTGGTTCTGGCGGCGGCGGCTCCGGTGGT |
| | | | | GGTGGTTCTCAGACTGTTGTGACTCAGGAACCTTCACTCACCGTATCA |
| | | | | CCTGGTGGAACAGTCACACTCACTTGTGGCTCCTCGACTGGGGCTGTT |
| | | | | ACATCTGGCAACTACCCAAACTGGGTCCAACAAAAACCAGGTCAGGCA |
| | | | | CCCCGTGGTCTAATAGGTGGGACTAAGTTCCTCGCCCCCGGTACTCCT |
| | | | | GCCAGATTCTCAGGCTCCCTGCTTGGAGGCAAGGCTGCCCTCACCCTC |
| | | | | TCAGGGGTACAGCCAGAGGATGAGGCAGAATATTACTGTGTTCTATGG |
| | | | | TACAGCAACCGCTGGGTGTTCGGTGGAGGAACCAAACTGACTGTCCT |
| 435. | PMH5B4-VH | artificial | aa | QVQLVQSGAEVKKPGASVKVSCKASGYNFKDTYMDWVKQTPEQGLEWM |
| | | | | GRIDPANGDSKYDPKFQGRVTITADTSTNTAYMELSSLRSEDTAVYYC |
| | | | | ARGGMIWYFDVWGQGTTVTVSS |
| 436. | PMH5B4-HCDR1 | artificial | aa | DTYMD |
| 437. | PMH5B4-HCDR2 | artificial | aa | RIDPANGDSKYDPKFQG |
| 438. | PMH5B4-HCDR3 | artificial | aa | GGMIWYFDV |
| 439. | PMH5B4-VH | artificial | nt | CAGGTGCAGCTGGTCCAGTCTGGGGCAGAGGTTAAGAAGCCAGGGGCC |
| | | | | TCAGTCAAGGTGTCCTGCAAAGCTTCTGGCTACAACTTTAAAGACACC |
| | | | | TATATGGACTGGGTGAAGCAGACGCCTGAACAGGGCCTGGAATGGATG |
| | | | | GGAAGGATTGATCCTGCGAATGGTGATAGTAAATATGACCCGAAATTC |
| | | | | CAGGGCAGGGTCACTATAACAGCAGACACATCCACCAACACAGCCTAC |
| | | | | ATGGAGCTCAGCAGCCTGAGATCTGAGGACACTGCCGTCTATTATTGT |
| | | | | GCTAGAGGCGGGATGATATGGTACTTCGATGTCTGGGGCCAAGGGACC |
| | | | | ACGGTCACCGTCTCCTCA |
| 440. | PMH5B4-VL | artificial | aa | EIVLTQSPTTLALSPGERVTLSCSASSSISSNYLHWYQQKPGLPPRLL |
| | | | | IYRTSNLASGIPDRFSGSGSGTDFTLTISRLEPEDVAVYYCQQGSSLP |
| | | | | YTFGQGTKLEIK |
| 441. | PMH5B4-LCDR1 | artificial | aa | SASSSISSNYLH |
| 442. | PMH5B4-LCDR2 | artificial | aa | RTSNLAS |
| 443. | PMH5B4-LCDR3 | artificial | aa | QQGSSLPYT |
| 444. | PMH5B4-VL | artificial | nt | GAGATCGTGCTCACCCAGTCTCCAACCACCCTGGCTCTATCTCCCGGG |
| | | | | GAGAGGGTCACTCTCTCCTGCAGTGCCAGCTCTAGTATAAGTTCCAAT |
| | | | | TACTTGCATTGGTATCAGCAGAAGCCAGGATTGCCCCCTAGACTCTTG |
| | | | | ATTTATAGGACATCCAATCTGGCTTCTGGAATCCCAGATCGCTTCAGT |
| | | | | GGCAGTGGGTCTGGGACCGATTTCACTCTCACAATTAGCAGGCTGGAG |
| | | | | CCTGAAGATGTTGCCGTTTACTACTGCCAGCAGGGTAGTAGTTTACCG |
| | | | | TACACGTTCGGACAAGGGACCAAGCTTGAGATCAAA |
| 445. | PMH5B4-VH-VL | artificial | aa | QVQLVQSGAEVKKPGASVKVSCKASGYNFKDTYMDWVKQTPEQGLEWM |
| | | | | GRIDPANGDSKYDPKFQGRVTITADTSTNTAYMELSSLRSEDTAVYYC |
| | | | | ARGGMIWYFDVWGQGTTVTVSSGGGGSGGGGSGGGGSEIVLTQSPTTL |
| | | | | ALSPGERVTLSCSASSSISSNYLHWYQQKPGLPPRLLIYRTSNLASGI |
| | | | | PDRFSGSGSGTDFTLTISRLEPEDVAVYYCQQGSSLPYTFGQGTKLEI |
| | | | | K |
| 446. | PMH5B4-VH-VL | artificial | nt | CAGGTGCAGCTGGTCCAGTCTGGGGCAGAGGTTAAGAAGCCAGGGGCC |
| | | | | TCAGTCAAGGTGTCCTGCAAAGCTTCTGGCTACAACTTTAAAGACACC |
| | | | | TATATGGACTGGGTGAAGCAGACGCCTGAACAGGGCCTGGAATGGATG |
| | | | | GGAAGGATTGATCCTGCGAATGGTGATAGTAAATATGACCCGAAATTC |
| | | | | CAGGGCAGGGTCACTATAACAGCAGACACATCCACCAACACAGCCTAC |
| | | | | ATGGAGCTCAGCAGCCTGAGATCTGAGGACACTGCCGTCTATTATTGT |
| | | | | GCTAGAGGCGGGATGATATGGTACTTCGATGTCTGGGGCCAAGGGACC |
| | | | | ACGGTCACCGTCTCCTCAGGTGGTGGTGGTTCTGGCGGCGGCGGCTCC |
| | | | | GGTGGTGGTGGTTCTGAGATCGTGCTCACCCAGTCTCCAACCACCCTG |
| | | | | GCTCTATCTCCCGGGGAGAGGGTCACTCTCTCCTGCAGTGCCAGCTCT |
| | | | | AGTATAAGTTCCAATTACTTGCATTGGTATCAGCAGAAGCCAGGATTG |
| | | | | CCCCCTAGACTCTTGATTTATAGGACATCCAATCTGGCTTCTGGAATC |
| | | | | CCAGATCGCTTCAGTGGCAGTGGGTCTGGGACCGATTTCACTCTCACA |
| | | | | ATTAGCAGGCTGGAGCCTGAAGATGTTGCCGTTTACTACTGCCAGCAG |
| | | | | GGTAGTAGTTTACCGTACACGTTCGGACAAGGGACCAAGCTTGAGATC |
| | | | | AAA |
| 447. | PMH5B4 VH-VL × I2C | artificial | aa | QVQLVQSGAEVKKPGASVKVSCKASGYNFKDTYMDWVKQTPEQGLEWM |
| | VH-VL | | | GRIDPANGDSKYDPKFQGRVTITADTSTNTAYMELSSLRSEDTAVYYC |
| | | | | ARGGMIWYFDVWGQGTTVTVSSGGGGSGGGGSGGGGSEIVLTQSPTTL |
| | | | | ALSPGERVTLSCSASSSISSNYLHWYQQKPGLPPRLLIYRTSNLASGI |
| | | | | PDRFSGSGSGTDFTLTISRLEPEDVAVYYCQQGSSLPYTFGQGTKLEI |
| | | | | KSGGGGSEVQLVESGGGLVQPGGSLKLSCAASGFTFNKYAMNWVRQAP |
| | | | | GKGLEWVARIRSKYNNYATYYADSVKDRFTISRDDSKNTAYLQMNNLK |
| | | | | TEDTAVYYCVRHGNFGNSYISYWAYWGQGTLVTVSSGGGGSGGGGSGG |
| | | | | GGSQTVVTQEPSLTVSPGGTVTLTCGSSTGAVTSGNYPNWVQQKPGQA |
| | | | | PRGLIGGTKFLAPGTPARFSGSLLGGKAALTLSGVQPEDEAEYYCVLW |
| | | | | YSNRWVFGGGTKLTVL |
| 448. | PMH5B4 VH-VL × I2C | artificial | nt | CAGGTGCAGCTGGTCCAGTCTGGGGCAGAGGTTAAGAAGCCAGGGGCC |
| | VH-VL | | | TCAGTCAAGGTGTCCTGCAAAGCTTCTGGCTACAACTTTAAAGACACC |
| | | | | TATATGGACTGGGTGAAGCAGACGCCTGAACAGGGCCTGGAATGGATG |
| | | | | GGAAGGATTGATCCTGCGAATGGTGATAGTAAATATGACCCGAAATTC |
| | | | | CAGGGCAGGGTCACTATAACAGCAGACACATCCACCAACACAGCCTAC |
| | | | | ATGGAGCTCAGCAGCCTGAGATCTGAGGACACTGCCGTCTATTATTGT |
| | | | | GCTAGAGGCGGGATGATATGGTACTTCGATGTCTGGGGCCAAGGGACC |
| | | | | ACGGTCACCGTCTCCTCAGGTGGTGGTGGTTCTGGCGGCGGCGGCTCC |
| | | | | GGTGGTGGTGGTTCTGAGATCGTGCTCACCCAGTCTCCAACCACCCTG |
| | | | | GCTCTATCTCCCGGGGAGAGGGTCACTCTCTCCTGCAGTGCCAGCTCT |
| | | | | AGTATAAGTTCCAATTACTTGCATTGGTATCAGCAGAAGCCAGGATTG |
| | | | | CCCCCTAGACTCTTGATTTATAGGACATCCAATCTGGCTTCTGGAATC |
| | | | | CCAGATCGCTTCAGTGGCAGTGGGTCTGGGACCGATTTCACTCTCACA |
| | | | | ATTAGCAGGCTGGAGCCTGAAGATGTTGCCGTTTACTACTGCCAGCAG |
| | | | | GGTAGTAGTTTACCGTACACGTTCGGACAAGGGACCAAGCTTGAGATC |
| | | | | AAATCCGGAGGTGGTGGATCCGAGGTGCAGCTGGTCGAGTCTGGAGGA |
| | | | | GGATTGGTGCAGCCTGGAGGGTCATTGAAACTCTCATGTGCAGCCTCT |
| | | | | GGATTCACCTTCAATAAGTACGCCATGAACTGGGTCCGCCAGGCTCCA |
| | | | | GGAAAGGGTTTGGAATGGGTTGCTCGCATAAGAAGTAAATATAATAAT |
| | | | | TATGCAACATATTATGCCGATTCAGTGAAAGACAGGTTCACCATCTCC |
| | | | | AGAGATGATTCAAAAAACACTGCCTATCTACAAATGAACAACTTGAAA |
| | | | | ACTGAGGACACTGCCGTGTACTACTGTGTGAGACATGGGAACTTCGGT |
| | | | | AATAGCTACATATCCTACTGGGCTTACTGGGGCCAAGGGACTCTGGTC |
| | | | | ACCGTCTCCTCAGGTGGTGGTGGTTCTGGCGGCGGCGGCTCCGGTGGT |
| | | | | GGTGGTTCTCAGACTGTTGTGACTCAGGAACCTTCACTCACCGTATCA |
| | | | | CCTGGTGGAACAGTCACACTCACTTGTGGCTCCTCGACTGGGGCTGTT |
| | | | | ACATCTGGCAACTACCCAAACTGGGTCCAACAAAAACCAGGTCAGGCA |
| | | | | CCCCGTGGTCTAATAGGTGGGACTAAGTTCCTCGCCCCCGGTACTCCT |
| | | | | GCCAGATTCTCAGGCTCCCTGCTTGGAGGCAAGGCTGCCCTCACCCTC |
| | | | | TCAGGGGTACAGCCAGAGGATGAGGCAGAATATTACTGTGTTCTATGG |
| | | | | TACAGCAACCGCTGGGTGTTCGGTGGAGGAACCAAACTGACTGTCCTA |
| 449. | PMH8B4-VH | artificial | aa | QVQLVQSGAEVVKPGASVKLSCKASGFTITDTYMDWVRQAPGQGLEWI |
| | | | | GRIDPANGDSKYDPKFQGRATITPDTSTNTVYMELSSLRSEDTAVYYC |
| | | | | ARGGMIWYFDVWGQGTTVTVSS |
| 450. | PMH8B4-HCDR1 | artificial | aa | DTYMD |
| 451. | PMH8B4-HCDR2 | artificial | aa | RIDPANGDSKYDPKFQG |
| 452. | PMH8B4-HCDR3 | artificial | aa | GGMIWYFDV |
| 453. | PMH8B4-VH | artificial | nt | CAGGTGCAGCTGGTCCAGTCTGGGGCAGAGGTTGTGAAGCCAGGGGCC |
| | | | | TCAGTCAAGTTGTCCTGCAAAGCTTCTGGCTTCACCATTACAGACACC |
| | | | | TATATGGACTGGGTGAGGCAGGCGCCTGGACAGGGCCTGGAATGGATT |
| | | | | GGAAGGATTGATCCTGCGAATGGTGATAGTAAATATGACCCGAAATTC |
| | | | | CAGGGCAGGGCCACTATAACACCAGACACATCCACCAACACAGTCTAC |
| | | | | ATGGAGCTCAGCAGCCTGAGATCTGAGGACACTGCCGTCTATTATTGT |
| | | | | GCTAGAGGCGGGATGATATGGTACTTCGATGTCTGGGGCCAAGGGACC |
| | | | | ACGGTCACCGTCTCCTCA |
| 454. | PMH8B4-VL | artificial | aa | EIVLTQSPTTLALSPGERVTLSCSASSSISSNYLHWYQQKPGLPPRLL |
| | | | | IYRTSNLASGIPDRFSGSGSGTDFTLTISRLEPEDVAVYYCQQGSSLP |
| | | | | YTFGQGTKLEIK |
| 455. | PMH8B4-LCDR1 | artificial | aa | SASSSISSNYLH |
| 456. | PMH8B4-LCDR2 | artificial | aa | RTSNLAS |
| 457. | PMH8B4-LCDR3 | artificial | aa | QQGSSLPYT |
| 458. | PMH8B4-VL | artificial | nt | GAGATCGTGCTCACCCAGTCTCCAACCACCCTGGCTCTATCTCCCGGG |
| | | | | GAGAGGGTCACTCTCTCCTGCAGTGCCAGCTCTAGTATAAGTTCCAAT |
| | | | | TACTTGCATTGGTATCAGCAGAAGCCAGGATTGCCCCCTAGACTCTTG |
| | | | | ATTTATAGGACATCCAATCTGGCTTCTGGAATCCCAGATCGCTTCAGT |
| | | | | GGCAGTGGGTCTGGGACCGATTTCACTCTCACAATTAGCAGGCTGGAG |
| | | | | CCTGAAGATGTTGCCGTTTACTACTGCCAGCAGGGTAGTAGTTTACCG |
| | | | | TACACGTTCGGACAAGGGACCAAGCTTGAGATCAAA |
| 459. | PMH8B4-VH-VL | artificial | aa | QVQLVQSGAEVVKPGASVKLSCKASGFTITDTYMDWVRQAPGQGLEWI |
| | | | | GRIDPANGDSKYDPKFQGRATITPDTSTNTVYMELSSLRSEDTAVYYC |
| | | | | ARGGMIWYFDVWGQGTTVTVSSGGGGSGGGGSGGGGSEIVLTQSPTTL |
| | | | | ALSPGERVTLSCSASSSISSNYLHWYQQKPGLPPRLLIYRTSNLASGI |
| | | | | PDRFSGSGSGTDFTLTISRLEPEDVAVYYCQQGSSLPYTFGQGTKLEI |
| | | | | K |
| 460. | PMH8B4-VH-VL | artificial | nt | CAGGTGCAGCTGGTCCAGTCTGGGGCAGAGGTTGTGAAGCCAGGGGCC |
| | | | | TCAGTCAAGTTGTCCTGCAAAGCTTCTGGCTTCACCATTACAGACACC |
| | | | | TATATGGACTGGGTGAGGCAGGCGCCTGGACAGGGCCTGGAATGGATT |
| | | | | GGAAGGATTGATCCTGCGAATGGTGATAGTAAATATGACCCGAAATTC |
| | | | | CAGGGCAGGGCCACTATAACACCAGACACATCCACCAACACAGTCTAC |
| | | | | ATGGAGCTCAGCAGCCTGAGATCTGAGGACACTGCCGTCTATTATTGT |
| | | | | GCTAGAGGCGGGATGATATGGTACTTCGATGTCTGGGGCCAAGGGACC |
| | | | | ACGGTCACCGTCTCCTCAGGTGGTGGTGGTTCTGGCGGCGGCGGCTCC |
| | | | | GGTGGTGGTGGTTCTGAGATCGTGCTCACCCAGTCTCCAACCACCCTG |
| | | | | GCTCTATCTCCCGGGGAGAGGGTCACTCTCTCCTGCAGTGCCAGCTCT |
| | | | | AGTATAAGTTCCAATTACTTGCATTGGTATCAGCAGAAGCCAGGATTG |
| | | | | CCCCCTAGACTCTTGATTTATAGGACATCCAATCTGGCTTCTGGAATC |
| | | | | CCAGATCGCTTCAGTGGCAGTGGGTCTGGGACCGATTTCACTCTCACA |
| | | | | ATTAGCAGGCTGGAGCCTGAAGATGTTGCCGTTTACTACTGCCAGCAG |
| | | | | GGTAGTAGTTTACCGTACACGTTCGGACAAGGGACCAAGCTTGAGATC |
| | | | | AAA |
| 461. | PMH8B4 VH-VL × I2C | artificial | aa | QVQLVQSGAEVVKPGASVKLSCKASGFTITDTYMDWVRQAPGQGLEWI |
| | VH-VL | | | GRIDPANGDSKYDPKFQGRATITPDTSTNTVYMELSSLRSEDTAVYYC |
| | | | | ARGGMIWYFDVWGQGTTVTVSSGGGGSGGGGSGGGGSEIVLTQSPTTL |
| | | | | ALSPGERVTLSCSASSSISSNYLHWYQQKPGLPPRLLIYRTSNLASGI |
| | | | | PDRFSGSGSGTDFTLTISRLEPEDVAVYYCQQGSSLPYTFGQGTKLEI |
| | | | | KSGGGGSEVQLVESGGGLVQPGGSLKLSCAASGFTFNKYAMNWVRQAP |
| | | | | GKGLEWVARIRSKYNNYATYYADSVKDRFTISRDDSKNTAYLQMNNLK |
| | | | | TEDTAVYYCVRHGNFGNSYISYWAYWGQGTLVTVSSGGGGSGGGGSGG |
| | | | | GGSQTVVTQEPSLTVSPGGTVTLTCGSSTGAVTSGNYPNWVQQKPGQA |
| | | | | PRGLIGGTKFLAPGTPARFSGSLLGGKAALTLSGVQPEDEAEYYCVLW |
| | | | | YSNRWVFGGGTKLTVL |
| 462. | PMH8B4 VH-VL × I2C | artificial | nt | CAGGTGCAGCTGGTCCAGTCTGGGGCAGAGGTTGTGAAGCCAGGGGCC |
| | VH-VL | | | TCAGTCAAGTTGTCCTGCAAAGCTTCTGGCTTCACCATTACAGACACC |
| | | | | TATATGGACTGGGTGAGGCAGGCGCCTGGACAGGGCCTGGAATGGATT |
| | | | | GGAAGGATTGATCCTGCGAATGGTGATAGTAAATATGACCCGAAATTC |
| | | | | CAGGGCAGGGCCACTATAACACCAGACACATCCACCAACACAGTCTAC |
| | | | | ATGGAGCTCAGCAGCCTGAGATCTGAGGACACTGCCGTCTATTATTGT |
| | | | | GCTAGAGGCGGGATGATATGGTACTTCGATGTCTGGGGCCAAGGGACC |
| | | | | ACGGTCACCGTCTCCTCAGGTGGTGGTGGTTCTGGCGGCGGCGGCTCC |
| | | | | GGTGGTGGTGGTTCTGAGATCGTGCTCACCCAGTCTCCAACCACCCTG |
| | | | | GCTCTATCTCCCGGGGAGAGGGTCACTCTCTCCTGCAGTGCCAGCTCT |
| | | | | AGTATAAGTTCCAATTACTTGCATTGGTATCAGCAGAAGCCAGGATTG |
| | | | | CCCCCTAGACTCTTGATTTATAGGACATCCAATCTGGCTTCTGGAATC |
| | | | | CCAGATCGCTTCAGTGGCAGTGGGTCTGGGACCGATTTCACTCTCACA |
| | | | | ATTAGCAGGCTGGAGCCTGAAGATGTTGCCGTTTACTACTGCCAGCAG |
| | | | | GGTAGTAGTTTACCGTACACGTTCGGACAAGGGACCAAGCTTGAGATC |
| | | | | AAATCCGGAGGTGGTGGATCCGAGGTGCAGCTGGTCGAGTCTGGAGGA |
| | | | | GGATTGGTGCAGCCTGGAGGGTCATTGAAACTCTCATGTGCAGCCTCT |
| | | | | GGATTCACCTTCAATAAGTACGCCATGAACTGGGTCCGCCAGGCTCCA |
| | | | | GGAAAGGGTTTGGAATGGGTTGCTCGCATAAGAAGTAAATATAATAAT |
| | | | | TATGCAACATATTATGCCGATTCAGTGAAAGACAGGTTCACCATCTCC |
| | | | | AGAGATGATTCAAAAAACACTGCCTATCTACAAATGAACAACTTGAAA |
| | | | | ACTGAGGACACTGCCGTGTACTACTGTGTGAGACATGGGAACTTCGGT |
| | | | | AATAGCTACATATCCTACTGGGCTTACTGGGGCCAAGGGACTCTGGTC |
| | | | | ACCGTCTCCTCAGGTGGTGGTGGTTCTGGCGGCGGCGGCTCCGGTGGT |
| | | | | GGTGGTTCTCAGACTGTTGTGACTCAGGAACCTTCACTCACCGTATCA |
| | | | | CCTGGTGGAACAGTCACACTCACTTGTGGCTCCTCGACTGGGGCTGTT |
| | | | | ACATCTGGCAACTACCCAAACTGGGTCCAACAAAAACCAGGTCAGGCA |
| | | | | CCCCGTGGTCTAATAGGTGGGACTAAGTTCCTCGCCCCCGGTACTCCT |
| | | | | GCCAGATTCTCAGGCTCCCTGCTTGGAGGCAAGGCTGCCCTCACCCTC |
| | | | | TCAGGGGTACAGCCAGAGGATGAGGCAGAATATTACTGTGTTCTATGG |
| | | | | TACAGCAACCGCTGGGTGTTCGGTGGAGGAACCAAACTGACTGTCCTA |
| 463. | PMH5C2-VH | artificial | aa | QVQLVQSGAEVKKPGASVKVSCKASGYNFKDTYMDWVKQTPEQGLEWM |
| | | | | GRIDPANGDSKYDPKFQGRVTITADTSTNTAYMELSSLRSEDTAVYYC |
| | | | | ARGGMIWYFDVWGQGTTVTVSS |
| 464. | PMH5C2-HCDR1 | artificial | aa | DTYMD |
| 465. | PMH5C2-HCDR2 | artificial | aa | RIDPANGDSKYDPKFQG |
| 466. | PMH5C2-HCDR3 | artificial | aa | GGMIWYFDV |
| 467. | PMH5C2-VH | artificial | nt | CAGGTGCAGCTGGTCCAGTCTGGGGCAGAGGTTAAGAAGCCAGGGGCC |
| | | | | TCAGTCAAGGTGTCCTGCAAAGCTTCTGGCTACAACTTTAAAGACACC |
| | | | | TATATGGACTGGGTGAAGCAGACGCCTGAACAGGGCCTGGAATGGATG |
| | | | | GGAAGGATTGATCCTGCGAATGGTGATAGTAAATATGACCCGAAATTC |
| | | | | CAGGGCAGGGTCACTATAACAGCAGACACATCCACCAACACAGCCTAC |
| | | | | ATGGAGCTCAGCAGCCTGAGATCTGAGGACACTGCCGTCTATTATTGT |
| | | | | GCTAGAGGCGGGATGATATGGTACTTCGATGTCTGGGGCCAAGGGACC |
| | | | | ACGGTCACCGTCTCCTCA |
| 468. | PMH5C2-VL | artificial | aa | EIVLTQSPATLSVSPGERATLSCSASSSISSNYLHWYQQKPGLPRLL |
| | | | | IYRTSNLASGIPARFSGSGSGTAFTLTISRLEPEDFAVYYCQQGSSLP |
| | | | | YTFGQGTKLEIK |
| 469. | PMH5C2-LCDR1 | artificial | aa | SASSSISSNYLH |
| 470. | PMH5C2-LCDR2 | artificial | aa | RTSNLAS |
| 471. | PMH5C2-LCDR3 | artificial | aa | QQGSSLPYT |
| 472. | PMH5C2-VL | artificial | nt | GAGATCGTGCTCACCCAGTCTCCAGCCACCCTGTCTGTATCTCCCGGG |
| | | | | GAGAGGGCCACTCTCTCCTGCAGTGCCAGCTCAAGTATAAGTTCCAAT |
| | | | | TACTTGCATTGGTATCAGCAGAAGCCAGGATTATCCCCTAGACTCTTG |
| | | | | ATTTATAGGACATCCAATCTGGCTTCTGGAATCCCAGCTCGCTTCAGT |
| | | | | GGCAGTGGGTCTGGGACCGCTTTCACTCTCACAATTAGCAGGCTGGAG |
| | | | | CCTGAAGATTTTGCCGTTTACTACTGCCAGCAGGGTAGTAGTTTACCG |
| | | | | TACACGTTCGGACAAGGGACCAAGCTTGAGATCAAA |
| 473. | PMH5C2-VH-VL | artificial | aa | QVQLVQSGAEVKKPGASVKVSCKASGYNFKDTYMDWVKQTPEQGLEWM |
| | | | | GRIDPANGDSKYDPKFQGRVTITADTSTNTAYMELSSLRSEDTAVYYC |
| | | | | ARGGMIWYFDVWGQGTTVTVSSGGGGSGGGGSGGGGSEIVLTQSPATL |
| | | | | SVSPGERATLSCSASSSISSNYLHWYQQKPGLSPRLLIYRTSNLASGI |
| | | | | PARFSGSGSGTAFTLTISRLEPEDFAVYYCQQGSSLPYTFGQGTKLEI |
| | | | | K |
| 474. | PMH5C2-VH-VL | artificial | nt | CAGGTGCAGCTGGTCCAGTCTGGGGCAGAGGTTAAGAAGCCAGGGGCC |
| | | | | TCAGTCAAGGTGTCCTGCAAAGCTTCTGGCTACAACTTTAAAGACACC |
| | | | | TATATGGACTGGGTGAAGCAGACGCCTGAACAGGGCCTGGAATGGATG |
| | | | | GGAAGGATTGATCCTGCGAATGGTGATAGTAAATATGACCCGAAATTC |
| | | | | CAGGGCAGGGTCACTATAACAGCAGACACATCCACCAACACAGCCTAC |
| | | | | ATGGAGCTCAGCAGCCTGAGATCTGAGGACACTGCCGTCTATTATTGT |
| | | | | GCTAGAGGCGGGATGATATGGTACTTCGATGTCTGGGGCCAAGGGACC |
| | | | | ACGGTCACCGTCTCCTCAGGTGGTGGTGGTTCTGGCGGCGGCGGCTCC |
| | | | | GGTGGTGGTGGTTCTGAGATCGTGCTCACCCAGTCTCCAGCCACCCTG |
| | | | | TCTGTATCTCCCGGGGAGAGGGCCACTCTCTCCTGCAGTGCCAGCTCA |
| | | | | AGTATAAGTTCCAATTACTTGCATTGGTATCAGCAGAAGCCAGGATTA |
| | | | | TCCCCTAGACTCTTGATTTATAGGACATCCAATCTGGCTTCTGGAATC |
| | | | | CCAGCTCGCTTCAGTGGCAGTGGGTCTGGGACCGCTTTCACTCTCACA |
| | | | | ATTAGCAGGCTGGAGCCTGAAGATTTTGCCGTTTACTACTGCCAGCAG |
| | | | | GGTAGTAGTTTACCGTACACGTTCGGACAAGGGACCAAGCTTGAGATC |
| | | | | AAA |
| 475. | PMH5C2 VH-VL × I2C | artificial | aa | QVQLVQSGAEVKKPGASVKVSCKASGYNFKDTYMDWVKQTPEQGLEWM |
| | VH-VL | | | GRIDPANGDSKYDPKFQGRVTITADTSTNTAYMELSSLRSEDTAVYYC |
| | | | | ARGGMIWYFDVWGQGTTVTVSSGGGGSGGGGSGGGGSEIVLTQSPATL |
| | | | | SVSPGERATLSCSASSSISSNYLHWYQQKPGLSPRLLIYRTSNLASGI |
| | | | | PARFSGSGSGTAFTLTISRLEPEDFAVYYCQQGSSLPYTFGQGTKLEI |
| | | | | KSGGGGSEVQLVESGGGLVQPGGSLKLSCAASGFTFNKYAMNWVRQAP |
| | | | | GKGLEWVARIRSKYNNYATYYADSVKDRFTISRDDSKNTAYLQMNNLK |
| | | | | TEDTAVYYCVRHGNFGNSYISYWAYWGQGTLVTVSSGGGGSGGGGSGG |
| | | | | GGSQTVVTQEPSLTVSPGGTVTLTCGSSTGAVTSGNYPNWVQQKPGQA |
| | | | | PRGLIGGTKFLAPGTPARFSGSLLGGKAALTLSGVQPEDEAEYYCVLW |
| | | | | YSNRWVFGGGTKLTVL |
| 476. | PMH5C2 VH-VL × I2C | artificial | nt | CAGGTGCAGCTGGTCCAGTCTGGGGCAGAGGTTAAGAAGCCAGGGGCC |
| | VH-VL | | | TCAGTCAAGGTGTCCTGCAAAGCTTCTGGCTACAACTTTAAAGACACC |
| | | | | TATATGGACTGGGTGAAGCAGACGCCTGAACAGGGCCTGGAATGGATG |
| | | | | GGAAGGATTGATCCTGCGAATGGTGATAGTAAATATGACCCGAAATTC |
| | | | | CAGGGCAGGGTCACTATAACAGCAGACACATCCACCAACACAGCCTAC |
| | | | | ATGGAGCTCAGCAGCCTGAGATCTGAGGACACTGCCGTCTATTATTGT |
| | | | | GCTAGAGGCGGGATGATATGGTACTTCGATGTCTGGGGCCAAGGGACC |
| | | | | ACGGTCACCGTCTCCTCAGGTGGTGGTGGTTCTGGCGGCGGCGGCTCC |
| | | | | GGTGGTGGTGGTTCTGAGATCGTGCTCACCCAGTCTCCAGCCACCCTG |
| | | | | TCTGTATCTCCCGGGGAGAGGGCCACTCTCTCCTGCAGTGCCAGCTCA |
| | | | | AGTATAAGTTCCAATTACTTGCATTGGTATCAGCAGAAGCCAGGATTA |
| | | | | TCCCCTAGACTCTTGATTTATAGGACATCCAATCTGGCTTCTGGAATC |
| | | | | CCAGCTCGCTTCAGTGGCAGTGGGTCTGGGACCGCTTTCACTCTCACA |
| | | | | ATTAGCAGGCTGGAGCCTGAAGATTTTGCCGTTTACTACTGCCAGCAG |
| | | | | GGTAGTAGTTTACCGTACACGTTCGGACAAGGGACCAAGCTTGAGATC |
| | | | | AAATCCGGAGGTGGTGGATCCGAGGTGCAGCTGGTCGAGTCTGGAGGA |
| | | | | GGATTGGTGCAGCCTGGAGGGTCATTGAAACTCTCATGTGCAGCCTCT |
| | | | | GGATTCACCTTCAATAAGTACGCCATGAACTGGGTCCGCCAGGCTCCA |
| | | | | GGAAAGGGTTTGGAATGGGTTGCTCGCATAAGAAGTAAATATAATAAT |
| | | | | TATGCAACATATTATGCCGATTCAGTGAAAGACAGGTTCACCATCTCC |
| | | | | AGAGATGATTCAAAAAACACTGCCTATCTACAAATGAACAACTTGAAA |
| | | | | ACTGAGGACACTGCCGTGTACTACTGTGTGAGACATGGGAACTTCGGT |
| | | | | AATAGCTACATATCCTACTGGGCTTACTGGGGCCAAGGGACTCTGGTC |
| | | | | ACCGTCTCCTCAGGTGGTGGTGGTTCTGGCGGCGGCGGCTCCGGTGGT |
| | | | | GGTGGTTCTCAGACTGTTGTGACTCAGGAACCTTCACTCACCGTATCA |
| | | | | CCTGGTGGAACAGTCACACTCACTTGTGGCTCCTCGACTGGGGCTGTT |
| | | | | ACATCTGGCAACTACCCAAACTGGGTCCAACAAAAACCAGGTCAGGCA |
| | | | | CCCCGTGGTCTAATAGGTGGGACTAAGTTCCTCGCCCCCGGTACTCCT |
| | | | | GCCAGATTCTCAGGCTCCCTGCTTGGAGGCAAGGCTGCCCTCACCCTC |
| | | | | TCAGGGGTACAGCCAGAGGATGAGGCAGAATATTACTGTGTTCTATGG |
| | | | | TACAGCAACCGCTGGGTGTTCGGTGGAGGAACCAAACTGACTGTCCTA |
| 477. | PMH8C2-VH | artificial | aa | QVQLVQSGAEVVKPGASVKLSCKASGFTITDTYMDWVRQAPGQGLEWI |
| | | | | GRIDPANGDSKYDPKFQGRATITPDTSTNTVYMELSSLRSEDTAVYYC |
| | | | | ARGGMIWYFDVWGQGTTVTVSS |
| 478. | PMH8C2-HCDR1 | artificial | aa | DTYMD |
| 479. | PMH8C2-HCDR2 | artificial | aa | RIDPANGDSKYDPKFQG |
| 480. | PMH8C2-HCDR3 | artificial | aa | GGMIWYFDV |
| 481. | PMH8C2-VH | artificial | nt | CAGGTGCAGCTGGTCCAGTCTGGGGCAGAGGTTGTGAAGCCAGGGGCC |
| | | | | TCAGTCAAGTTGTCCTGCAAAGCTTCTGGCTTCACCATTACAGACACC |
| | | | | TATATGGACTGGGTGAGGCAGGCGCCTGGACAGGGCCTGGAATGGATT |
| | | | | GGAAGGATTGATCCTGCGAATGGTGATAGTAAATATGACCCGAAATTC |
| | | | | CAGGGCAGGGCCACTATAACACCAGACACATCCACCAACACAGTCTAC |
| | | | | ATGGAGCTCAGCAGCCTGAGATCTGAGGACACTGCCGTCTATTATTGT |
| | | | | GCTAGAGGCGGGATGATATGGTACTTCGATGTCTGGGGCCAAGGGACC |
| | | | | ACGGTCACCGTCTCCTCA |
| 482. | PMH8C2-VL | artificial | aa | EIVLTQSPATLSVSPGERATLSCSASSSISSNYLHWYQQKPGLSPRLL |
| | | | | IYRTSNLASGIPARFSGSGSGTAFTLTISRLEPEDFAVYYCQQGSSLP |
| | | | | YTFGQGTKLEIK |
| 483. | PMH8C2-LCDR1 | artificial | aa | SASSSISSNYLH |
| 484. | PMH8C2-LCDR2 | artificial | aa | RTSNLAS |
| 485. | PMH8C2-LCDR3 | artificial | aa | QQGSSLPYT |
| 486. | PMH8C2-VL | artificial | nt | GAGATCGTGCTCACCCAGTCTCCAGCCACCCTGTCTGTATCTCCCGGG |
| | | | | GAGAGGGCCACTCTCTCCTGCAGTGCCAGCTCAAGTATAAGTTCCAAT |
| | | | | TACTTGCATTGGTATCAGCAGAAGCCAGGATTATCCCCTAGACTCTTG |
| | | | | ATTTATAGGACATCCAATCTGGCTTCTGGAATCCCAGCTCGCTTCAGT |
| | | | | GGCAGTGGGTCTGGGACCGCTTTCACTCTCACAATTAGCAGGCTGGAG |
| | | | | CCTGAAGATTTTGCCGTTTACTACTGCCAGCAGGGTAGTAGTTTACCG |
| | | | | TACACGTTCGGACAAGGGACCAAGCTTGAGATCAAA |
| 487. | PMH8C2-VH-VL | artificial | aa | QVQLVQSGAEVVKPGASVKLSCKASGFTITDTYMDWVRQAPGQGLEWI |
| | | | | GRIDPANGDSKYDPKFQGRATITPDTSTNTVYMELSSLRSEDTAVYYC |
| | | | | ARGGMIWYFDVWGQGTTVTVSSGGGGSGGGGSGGGGSEIVLTQSPATL |
| | | | | SVSPGERATLSCSASSSISSNYLHWYQQKPGLSPRLLIYRTSNLASGI |
| | | | | PARFSGSGSGTAFTLTISRLEPEDFAVYYCQQGSSLPYTFGQGTKLEI |
| | | | | K |
| 488. | PMH8C2-VH-VL | artificial | nt | CAGGTGCAGCTGGTCCAGTCTGGGGCAGAGGTTGTGAAGCCAGGGGCC |
| | | | | TCAGTCAAGTTGTCCTGCAAAGCTTCTGGCTTCACCATTACAGACACC |
| | | | | TATATGGACTGGGTGAGGCAGGCGCCTGGACAGGGCCTGGAATGGATT |
| | | | | GGAAGGATTGATCCTGCGAATGGTGATAGTAAATATGACCCGAAATTC |
| | | | | CAGGGCAGGGCCACTATAACACCAGACACATCCACCAACACAGTCTAC |
| | | | | ATGGAGCTCAGCAGCCTGAGATCTGAGGACACTGCCGTCTATTATTGT |
| | | | | GCTAGAGGCGGGATGATATGGTACTTCGATGTCTGGGGCCAAGGGACC |
| | | | | ACGGTCACCGTCTCCTCAGGTGGTGGTGGTTCTGGCGGCGGCGGCTCC |
| | | | | GGTGGTGGTGGTTCTGAGATCGTGCTCACCCAGTCTCCAGCCACCCTG |
| | | | | TCTGTATCTCCCGGGGAGAGGGCCACTCTCTCCTGCAGTGCCAGCTCA |
| | | | | AGTATAAGTTCCAATTACTTGCATTGGTATCAGCAGAAGCCAGGATTA |
| | | | | TCCCCTAGACTCTTGATTTATAGGACATCCAATCTGGCTTCTGGAATC |
| | | | | CCAGCTCGCTTCAGTGGCAGTGGGTCTGGGACCGCTTTCACTCTCACA |
| | | | | ATTAGCAGGCTGGAGCCTGAAGATTTTGCCGTTTACTACTGCCAGCAG |
| | | | | GGTAGTAGTTTACCGTACACGTTCGGACAAGGGACCAAGCTTGAGATC |
| | | | | AAA |
| 489. | PMH8C2 VH-VL × I2C | artificial | aa | QVQLVQSGAEVVKPGASVKLSCKASGFTITDTYMDWVRQAPGQGLEWI |
| | VH-VL | | | GRIDPANGDSKYDPKFQGRATITPDTSTNTVYMELSSLRSEDTAVYYC |
| | | | | ARGGMIWYFDVWGQGTTVTVSSGGGGSGGGGSGGGGSEIVLTQSPATL |
| | | | | SVSPGERATLSCSASSSISSNYLHWYQQKPGLSPRLLIYRTSNLASGI |
| | | | | PARFSGSGSGTAFTLTISRLEPEDFAVYYCQQGSSLPYTFGQGTKLEI |
| | | | | KSGGGGSEVQLVESGGGLVQPGGSLKLSCAASGFTFNKYAMNWVRQAP |
| | | | | GKGLEWVARIRSKYNNYATYYADSVKDRFTISRDDSKNTAYLQMNNLK |
| | | | | TEDTAVYYCVRHGNFGNSYISYWAYWGQGTLVTVSSGGGGSGGGGSGG |
| | | | | GGSQTVVTQEPSLTVSPGGTVTLTCGSSTGAVTSGNYPNWVQQKPGQA |
| | | | | PRGLIGGTKFLAPGTPARFSGSLLGGKAALTLSGVQPEDEAEYYCVLW |
| | | | | YSNRWVFGGGTKLTVL |
| 490. | PMH8C2 VH-VL × I2C | artificial | nt | CAGGTGCAGCTGGTCCAGTCTGGGGCAGAGGTTGTGAAGCCAGGGGCC |
| | VH-VL | | | TCAGTCAAGTTGTCCTGCAAAGCTTCTGGCTTCACCATTACAGACACC |
| | | | | TATATGGACTGGGTGAGGCAGGCGCCTGGACAGGGCCTGGAATGGATT |
| | | | | GGAAGGATTGATCCTGCGAATGGTGATAGTAAATATGACCCGAAATTC |
| | | | | CAGGGCAGGGCCACTATAACACCAGACACATCCACCAACACAGTCTAC |
| | | | | ATGGAGCTCAGCAGCCTGAGATCTGAGGACACTGCCGTCTATTATTGT |
| | | | | GCTAGAGGCGGGATGATATGGTACTTCGATGTCTGGGGCCAAGGGACC |
| | | | | ACGGTCACCGTCTCCTCAGGTGGTGGTGGTTCTGGCGGCGGCGGCTCC |
| | | | | GGTGGTGGTGGTTCTGAGATCGTGCTCACCCAGTCTCCAGCCACCCTG |
| | | | | TCTGTATCTCCCGGGGAGAGGGCCACTCTCTCCTGCAGTGCCAGCTCA |
| | | | | AGTATAAGTTCCAATTACTTGCATTGGTATCAGCAGAAGCCAGGATTA |
| | | | | TCCCCTAGACTCTTGATTTATAGGACATCCAATCTGGCTTCTGGAATC |
| | | | | CCAGCTCGCTTCAGTGGCAGTGGGTCTGGGACCGCTTTCACTCTCACA |
| | | | | ATTAGCAGGCTGGAGCCTGAAGATTTTGCCGTTTACTACTGCCAGCAG |
| | | | | GGTAGTAGTTTACCGTACACGTTCGGACAAGGGACCAAGCTTGAGATC |
| | | | | AAATCCGGAGGTGGTGGATCCGAGGTGCAGCTGGTCGAGTCTGGAGGA |
| | | | | GGATTGGTGCAGCCTGGAGGGTCATTGAAACTCTCATGTGCAGCCTCT |
| | | | | GGATTCACCTTCAATAAGTACGCCATGAACTGGGTCCGCCAGGCTCCA |
| | | | | GGAAAGGGTTTGGAATGGGTTGCTCGCATAAGAAGTAAATATAATAAT |
| | | | | TATGCAACATATTATGCCGATTCAGTGAAAGACAGGTTCACCATCTCC |
| | | | | AGAGATGATTCAAAAAACACTGCCTATCTACAAATGAACAACTTGAAA |
| | | | | ACTGAGGACACTGCCGTGTACTACTGTGTGAGACATGGGAACTTCGGT |
| | | | | AATAGCTACATATCCTACTGGGCTTACTGGGGCCAAGGGACTCTGGTC |
| | | | | ACCGTCTCCTCAGGTGGTGGTGGTTCTGGCGGCGGCGGCTCCGGTGGT |
| | | | | GGTGGTTCTCAGACTGTTGTGACTCAGGAACCTTCACTCACCGTATCA |
| | | | | CCTGGTGGAACAGTCACACTCACTTGTGGCTCCTCGACTGGGGCTGTT |
| | | | | ACATCTGGCAACTACCCAAACTGGGTCCAACAAAAACCAGGTCAGGCA |
| | | | | CCCCGTGGTCTAATAGGTGGGACTAAGTTCCTCGCCCCCGGTACTCCT |
| | | | | GCCAGATTCTCAGGCTCCCTGCTTGGAGGCAAGGCTGCCCTCACCCTC |
| | | | | TCAGGGGTACAGCCAGAGGATGAGGCAGAATATTACTGTGTTCTATGG |
| | | | | TACAGCAACCGCTGGGTGTTCGGTGGAGGAACCAAACTGACTGTCCTA |
| 491. | PMH5D1-VH | artificial | aa | QVQLVQSGAEVKKPGASVKVSCKASGYNFKDTYMDWVKQTPEQGLEWM |
| | | | | GRIDPANGDSKYDPKFQGRVTITADTSTNTAYMELSSLRSEDTAVYYC |
| | | | | ARGGMIWYFDVWGQGTTVTVSS |
| 492. | PMH5D1-HCDR1 | artificial | aa | DTYMD |
| 493. | PMH5D1-HCDR2 | artificial | aa | RIDPANGDSKYDPKFQG |
| 494. | PMH5D1-HCDR3 | artificial | aa | GGMIWYFDV |
| 495. | PMH5D1-VH | artificial | nt | CAGGTGCAGCTGGTCCAGTCTGGGGCAGAGGTTAAGAAGCCAGGGGCC |
| | | | | TCAGTCAAGGTGTCCTGCAAAGCTTCTGGCTACAACTTTAAAGACACC |
| | | | | TATATGGACTGGGTGAAGCAGACGCCTGAACAGGGCCTGGAATGGATG |
| | | | | GGAAGGATTGATCCTGCGAATGGTGATAGTAAATATGACCCGAAATTC |
| | | | | CAGGGCAGGGTCACTATAACAGCAGACACATCCACCAACACAGCCTAC |
| | | | | ATGGAGCTCAGCAGCCTGAGATCTGAGGACACTGCCGTCTATTATTGT |
| | | | | GCTAGAGGCGGGATGATATGGTACTTCGATGTCTGGGGCCAAGGGACC |
| | | | | ACGGTCACCGTCTCCTCA |
| 496. | PMH5D1-VL | artificial | aa | EIVLTQSPATLSLSPGERATLSCSASSSISSNYLHWYQQKPGLPPRLL |
| | | | | IYRTSNLASGIPARFSGSGSGTDFTLTISRLEPEDVAVYYCQQGSSLP |
| | | | | YTFGQGTKLEIK |
| 497. | PMH5D1-LCDR1 | artificial | aa | SASSSISSNYLH |
| 498. | PMH5D1-LCDR2 | artificial | aa | RTSNLAS |
| 499. | PMH5D1-LCDR3 | artificial | aa | QQGSSLPYT |
| 500. | PMH5D1-VL | artificial | nt | GAGATCGTGCTCACCCAGTCTCCAGCCACCCTGTCTCTATCTCCCGGG |
| | | | | GAGAGGGCCACTCTCTCCTGCAGTGCCAGCTCAAGTATAAGTTCCAAT |
| | | | | TACTTGCATTGGTATCAGCAGAAGCCAGGATTACCCCCTAGACTCTTG |
| | | | | ATTTATAGGACATCCAATCTGGCTTCTGGAATCCCAGCTCGCTTCAGT |
| | | | | GGCAGTGGGTCTGGGACCGATTTCACTCTCACAATTAGCAGGCTGGAG |
| | | | | CCTGAAGATGTTGCCGTTTACTACTGCCAGCAGGGTAGTAGTTTACCG |
| | | | | TACACGTTCGGACAAGGGACCAAGCTTGAGATCAAA |
| 501. | PMH5D1-VH-VL | artificial | aa | QVQLVQSGAEVKKPGASVKVSCKASGYNFKDTYMDWVKQTPEQGLEWM |
| | | | | GRIDPANGDSKYDPKFQGRVTITADTSTNTAYMELSSLRSEDTAVYYC |
| | | | | ARGGMIWYFDVWGQGTTVTVSSGGGGSGGGGSGGGGSEIVLTQSPATL |
| | | | | SLSPGERATLSCSASSSISSNYLHWYQQKPGLPPRLLIYRTSNLASGI |
| | | | | PARFSGSGSGTDFTLTISRLEPEDVAVYYCQQGSSLPYTFGQGTKLEI |
| | | | | K |
| 502. | PMH5D1-VH-VL | artificial | nt | CAGGTGCAGCTGGTCCAGTCTGGGGCAGAGGTTAAGAAGCCAGGGGCC |
| | | | | TCAGTCAAGGTGTCCTGCAAAGCTTCTGGCTACAACTTTAAAGACACC |
| | | | | TATATGGACTGGGTGAAGCAGACGCCTGAACAGGGCCTGGAATGGATG |
| | | | | GGAAGGATTGATCCTGCGAATGGTGATAGTAAATATGACCCGAAATTC |
| | | | | CAGGGCAGGGTCACTATAACAGCAGACACATCCACCAACACAGCCTAC |
| | | | | ATGGAGCTCAGCAGCCTGAGATCTGAGGACACTGCCGTCTATTATTGT |
| | | | | GCTAGAGGCGGGATGATATGGTACTTCGATGTCTGGGGCCAAGGGACC |
| | | | | ACGGTCACCGTCTCCTCAGGTGGTGGTGGTTCTGGCGGCGGCGGCTCC |
| | | | | GGTGGTGGTGGTTCTGAGATCGTGCTCACCCAGTCTCCAGCCACCCTG |
| | | | | TCTCTATCTCCCGGGGAGAGGGCCACTCTCTCCTGCAGTGCCAGCTCA |
| | | | | AGTATAAGTTCCAATTACTTGCATTGGTATCAGCAGAAGCCAGGATTA |
| | | | | CCCCCTAGACTCTTGATTTATAGGACATCCAATCTGGCTTCTGGAATC |
| | | | | CCAGCTCGCTTCAGTGGCAGTGGGTCTGGGACCGATTTCACTCTCACA |
| | | | | ATTAGCAGGCTGGAGCCTGAAGATGTTGCCGTTTACTACTGCCAGCAG |
| | | | | GGTAGTAGTTTACCGTACACGTTCGGACAAGGGACCAAGCTTGAGATC |
| | | | | AAA |
| 503. | PMH5D1 VH-VL × I2C | artificial | aa | QVQLVQSGAEVKKPGASVKVSCKASGYNFKDTYMDWVKQTPEQGLEWM |
| | VH-VL | | | GRIDPANGDSKYDPKFQGRVTITADTSTNTAYMELSSLRSEDTAVYYC |
| | | | | ARGGMIWYFDVWGQGTTVTVSSGGGGSGGGGSGGGGSEIVLTQSPATL |
| | | | | SLSPGERATLSCSASSSISSNYLHWYQQKPGLPPRLLIYRTSNLASGI |
| | | | | PARFSGSGSGTDFTLTISRLEPEDVAVYYCQQGSSLPYTFGQGTKLEI |
| | | | | KSGGGGSEVQLVESGGGLVQPGGSLKLSCAASGFTFNKYAMNWVRQAP |
| | | | | GKGLEWVARIRSKYNNYATYYADSVKDRFTISRDDSKNTAYLQMNNLK |
| | | | | TEDTAVYYCVRHGNFGNSYISYWAYWGQGTLVTVSSGGGGSGGGGSGG |
| | | | | GGSQTVVTQEPSLTVSPGGTVTLTCGSSTGAVTSGNYPNWVQQKPGQA |
| | | | | PRGLIGGTKFLAPGTPARFSGSLLGGKAALTLSGVQPEDEAEYYCVLW |
| | | | | YSNRWVFGGGTKLTVL |
| 504. | PMH5D1 VH-VL × I2C | artificial | nt | CAGGTGCAGCTGGTCCAGTCTGGGGCAGAGGTTAAGAAGCCAGGGGCC |
| | VH-VL | | | TCAGTCAAGGTGTCCTGCAAAGCTTCTGGCTACAACTTTAAAGACACC |
| | | | | TATATGGACTGGGTGAAGCAGACGCCTGAACAGGGCCTGGAATGGATG |
| | | | | GGAAGGATTGATCCTGCGAATGGTGATAGTAAATATGACCCGAAATTC |
| | | | | CAGGGCAGGGTCACTATAACAGCAGACACATCCACCAACACAGCCTAC |
| | | | | ATGGAGCTCAGCAGCCTGAGATCTGAGGACACTGCCGTCTATTATTGT |
| | | | | GCTAGAGGCGGGATGATATGGTACTTCGATGTCTGGGGCCAAGGGACC |
| | | | | ACGGTCACCGTCTCCTCAGGTGGTGGTGGTTCTGGCGGCGGCGGCTCC |
| | | | | GGTGGTGGTGGTTCTGAGATCGTGCTCACCCAGTCTCCAGCCACCCTG |
| | | | | TCTCTATCTCCCGGGGAGAGGGCCACTCTCTCCTGCAGTGCCAGCTCA |
| | | | | AGTATAAGTTCCAATTACTTGCATTGGTATCAGCAGAAGCCAGGATTA |
| | | | | CCCCCTAGACTCTTGATTTATAGGACATCCAATCTGGCTTCTGGAATC |
| | | | | CCAGCTCGCTTCAGTGGCAGTGGGTCTGGGACCGATTTCACTCTCACA |
| | | | | ATTAGCAGGCTGGAGCCTGAAGATGTTGCCGTTTACTACTGCCAGCAG |
| | | | | GGTAGTAGTTTACCGTACACGTTCGGACAAGGGACCAAGCTTGAGATC |
| | | | | AAATCCGGAGGTGGTGGATCCGAGGTGCAGCTGGTCGAGTCTGGAGGA |
| | | | | GGATTGGTGCAGCCTGGAGGGTCATTGAAACTCTCATGTGCAGCCTCT |
| | | | | GGATTCACCTTCAATAAGTACGCCATGAACTGGGTCCGCCAGGCTCCA |
| | | | | GGAAAGGGTTTGGAATGGGTTGCTCGCATAAGAAGTAAATATAATAAT |
| | | | | TATGCAACATATTATGCCGATTCAGTGAAAGACAGGTTCACCATCTCC |
| | | | | AGAGATGATTCAAAAAACACTGCCTATCTACAAATGAACAACTTGAAA |
| | | | | ACTGAGGACACTGCCGTGTACTACTGTGTGAGACATGGGAACTTCGGT |
| | | | | AATAGCTACATATCCTACTGGGCTTACTGGGGCCAAGGGACTCTGGTC |
| | | | | ACCGTCTCCTCAGGTGGTGGTGGTTCTGGCGGCGGCGGCTCCGGTGGT |
| | | | | GGTGGTTCTCAGACTGTTGTGACTCAGGAACCTTCACTCACCGTATCA |
| | | | | CCTGGTGGAACAGTCACACTCACTTGTGGCTCCTCGACTGGGGCTGTT |
| | | | | ACATCTGGCAACTACCCAAACTGGGTCCAACAAAAACCAGGTCAGGCA |
| | | | | CCCCGTGGTCTAATAGGTGGGACTAAGTTCCTCGCCCCCGGTACTCCT |
| | | | | GCCAGATTCTCAGGCTCCCTGCTTGGAGGCAAGGCTGCCCTCACCCTC |
| | | | | TCAGGGGTACAGCCAGAGGATGAGGCAGAATATTACTGTGTTCTATGG |
| | | | | TACAGCAACCGCTGGGTGTTCGGTGGAGGAACCAAACTGACTGTCCTA |
| 505. | PMH8D1-VH | artificial | aa | QVQLVQSGAEVVKPGASVKLSCKASGFTITDTYMDWVRQAPGQGLEWI |
| | | | | GRIDPANGDSKYDPKFQGRATITPDTSTNTVYMELSSLRSEDTAVYYC |
| | | | | ARGGMIWYFDVWGQGTTVTVSS |
| 506. | PMH8D1-HCDR1 | artificial | aa | DTYMD |
| 507. | PMH8D1-HCDR2 | artificial | aa | RIDPANGDSKYDPKFQG |
| 508. | PMH8D1-HCDR3 | artificial | aa | GGMIWYFDV |
| 509. | PMH8D1-VH | artificial | nt | CAGGTGCAGCTGGTCCAGTCTGGGGCAGAGGTTGTGAAGCCAGGGGCC |
| | | | | TCAGTCAAGTTGTCCTGCAAAGCTTCTGGCTTCACCATTACAGACACC |
| | | | | TATATGGACTGGGTGAGGCAGGCGCCTGGACAGGGCCTGGAATGGATT |
| | | | | GGAAGGATTGATCCTGCGAATGGTGATAGTAAATATGACCCGAAATTC |
| | | | | CAGGGCAGGGCCACTATAACACCAGACACATCCACCAACACAGTCTAC |
| | | | | ATGGAGCTCAGCAGCCTGAGATCTGAGGACACTGCCGTCTATTATTGT |
| | | | | GCTAGAGGCGGGATGATATGGTACTTCGATGTCTGGGGCCAAGGGACC |
| | | | | ACGGTCACCGTCTCCTCA |
| 510. | PMH8D1-VL | artificial | aa | EIVLTQSPATLSLSPGERATLSCSASSSISSNYLHWYQQKPGLPPRLL |
| | | | | IYRTSNLASGIPARFSGSGSGTDFTLTISRLEPEDVAVYYCQQGSSLP |
| | | | | YTFGQGTKLEIK |
| 511. | PMH8D1-LCDR1 | artificial | aa | SASSSISSNYLH |
| 512. | PMH8D1-LCDR2 | artificial | aa | RTSNLAS |
| 513. | PMH8D1-LCDR3 | artificial | aa | QQGSSLPYT |
| 514. | PMH8D1-VL | artificial | nt | GAGATCGTGCTCACCCAGTCTCCAGCCACCCTGTCTCTATCTCCCGGG |
| | | | | GAGAGGGCCACTCTCTCCTGCAGTGCCAGCTCAAGTATAAGTTCCAAT |
| | | | | TACTTGCATTGGTATCAGCAGAAGCCAGGATTACCCCCTAGACTCTTG |
| | | | | ATTTATAGGACATCCAATCTGGCTTCTGGAATCCCAGCTCGCTTCAGT |
| | | | | GGCAGTGGGTCTGGGACCGATTTCACTCTCACAATTAGCAGGCTGGAG |
| | | | | CCTGAAGATGTTGCCGTTTACTACTGCCAGCAGGGTAGTAGTTTACCG |
| | | | | TACACGTTCGGACAAGGGACCAAGCTTGAGATCAAA |
| 515. | PMH8D1-VH-VL | artificial | aa | QVQLVQSGAEVVKPGASVKLSCKASGFTITDTYMDWVRQAPGQGLEWI |
| | | | | GRIDPANGDSKYDPKFQGRATITPDTSTNTVYMELSSLRSEDTAVYYC |
| | | | | ARGGMIWYFDVWGQGTTVTVSSGGGGSGGGGSGGGGSEIVLTQSPATL |
| | | | | SLSPGERATLSCSASSSISSNYLHWYQQKPGLPPRLLIYRTSNLASGI |
| | | | | PARFSGSGSGTDFTLTISRLEPEDVAVYYCQQGSSLPYTFGQGTKLEI |
| | | | | K |
| 516. | PMH8D1-VH-VL | artificial | nt | CAGGTGCAGCTGGTCCAGTCTGGGGCAGAGGTTGTGAAGCCAGGGGCC |
| | | | | TCAGTCAAGTTGTCCTGCAAAGCTTCTGGCTTCACCATTACAGACACC |
| | | | | TATATGGACTGGGTGAGGCAGGCGCCTGGACAGGGCCTGGAATGGATT |
| | | | | GGAAGGATTGATCCTGCGAATGGTGATAGTAAATATGACCCGAAATTC |
| | | | | CAGGGCAGGGCCACTATAACACCAGACACATCCACCAACACAGTCTAC |
| | | | | ATGGAGCTCAGCAGCCTGAGATCTGAGGACACTGCCGTCTATTATTGT |
| | | | | GCTAGAGGCGGGATGATATGGTACTTCGATGTCTGGGGCCAAGGGACC |
| | | | | ACGGTCACCGTCTCCTCAGGTGGTGGTGGTTCTGGCGGCGGCGGCTCC |
| | | | | GGTGGTGGTGGTTCTGAGATCGTGCTCACCCAGTCTCCAGCCACCCTG |
| | | | | TCTCTATCTCCCGGGGAGAGGGCCACTCTCTCCTGCAGTGCCAGCTCA |
| | | | | AGTATAAGTTCCAATTACTTGCATTGGTATCAGCAGAAGCCAGGATTA |
| | | | | CCCCCTAGACTCTTGATTTATAGGACATCCAATCTGGCTTCTGGAATC |
| | | | | CCAGCTCGCTTCAGTGGCAGTGGGTCTGGGACCGATTTCACTCTCACA |
| | | | | ATTAGCAGGCTGGAGCCTGAAGATGTTGCCGTTTACTACTGCCAGCAG |
| | | | | GGTAGTAGTTTACCGTACACGTTCGGACAAGGGACCAAGCTTGAGATC |
| | | | | AAA |
| 517. | PMH8D1 VH-VL × I2C | artificial | aa | QVQLVQSGAEVVKPGASVKLSCKASGFTITDTYMDWVRQAPGQGLEWI |
| | VH-VL | | | GRIDPANGDSKYDPKFQGRATITPDTSTNTVYMELSSLRSEDTAVYYC |
| | | | | ARGGMIWYFDVWGQGTTVTVSSGGGGSGGGGSGGGGSEIVLTQSPATL |
| | | | | SLSPGERATLSCSASSSISSNYLHWYQQKPGLPPRLLIYRTSNLASGI |
| | | | | PARFSGSGSGTDFTLTISRLEPEDVAVYYCQQGSSLPYTFGQGTKLEI |
| | | | | KSGGGGSEVQLVESGGGLVQPGGSLKLSCAASGFTFNKYAMNWVRQAP |
| | | | | GKGLEWVARIRSKYNNYATYYADSVKDRFTISRDDSKNTAYLQMNNLK |
| | | | | TEDTAVYYCVRHGNFGNSYISYWAYWGQGTLVTVSSGGGGSGGGGSGG |
| | | | | GGSQTVVTQEPSLTVSPGGTVTLTCGSSTGAVTSGNYPNWVQQKPGQA |
| | | | | PRGLIGGTKFLAPGTPARFSGSLLGGKAALTLSGVQPEDEAEYYCVLW |
| | | | | YSNRWVFGGGTKLTVL |
| 518. | PMH8D1 VH-VL × I2C | artificial | nt | CAGGTGCAGCTGGTCCAGTCTGGGGCAGAGGTTGTGAAGCCAGGGGCC |
| | VH-VL | | | TCAGTCAAGTTGTCCTGCAAAGCTTCTGGCTTCACCATTACAGACACC |
| | | | | TATATGGACTGGGTGAGGCAGGCGCCTGGACAGGGCCTGGAATGGATT |
| | | | | GGAAGGATTGATCCTGCGAATGGTGATAGTAAATATGACCCGAAATTC |
| | | | | CAGGGCAGGGCCACTATAACACCAGACACATCCACCAACACAGTCTAC |
| | | | | ATGGAGCTCAGCAGCCTGAGATCTGAGGACACTGCCGTCTATTATTGT |
| | | | | GCTAGAGGCGGGATGATATGGTACTTCGATGTCTGGGGCCAAGGGACC |
| | | | | ACGGTCACCGTCTCCTCAGGTGGTGGTGGTTCTGGCGGCGGCGGCTCC |
| | | | | GGTGGTGGTGGTTCTGAGATCGTGCTCACCCAGTCTCCAGCCACCCTG |
| | | | | TCTCTATCTCCCGGGGAGAGGGCCACTCTCTCCTGCAGTGCCAGCTCA |
| | | | | AGTATAAGTTCCAATTACTTGCATTGGTATCAGCAGAAGCCAGGATTA |
| | | | | CCCCCTAGACTCTTGATTTATAGGACATCCAATCTGGCTTCTGGAATC |
| | | | | CCAGCTCGCTTCAGTGGCAGTGGGTCTGGGACCGATTTCACTCTCACA |
| | | | | ATTAGCAGGCTGGAGCCTGAAGATGTTGCCGTTTACTACTGCCAGCAG |
| | | | | GGTAGTAGTTTACCGTACACGTTCGGACAAGGGACCAAGCTTGAGATC |
| | | | | AAATCCGGAGGTGGTGGATCCGAGGTGCAGCTGGTCGAGTCTGGAGGA |
| | | | | GGATTGGTGCAGCCTGGAGGGTCATTGAAACTCTCATGTGCAGCCTCT |
| | | | | GGATTCACCTTCAATAAGTACGCCATGAACTGGGTCCGCCAGGCTCCA |
| | | | | GGAAAGGGTTTGGAATGGGTTGCTCGCATAAGAAGTAAATATAATAAT |
| | | | | TATGCAACATATTATGCCGATTCAGTGAAAGACAGGTTCACCATCTCC |
| | | | | AGAGATGATTCAAAAAACACTGCCTATCTACAAATGAACAACTTGAAA |
| | | | | ACTGAGGACACTGCCGTGTACTACTGTGTGAGACATGGGAACTTCGGT |
| | | | | AATAGCTACATATCCTACTGGGCTTACTGGGGCCAAGGGACTCTGGTC |
| | | | | ACCGTCTCCTCAGGTGGTGGTGGTTCTGGCGGCGGCGGCTCCGGTGGT |
| | | | | GGTGGTTCTCAGACTGTTGTGACTCAGGAACCTTCACTCACCGTATCA |
| | | | | CCTGGTGGAACAGTCACACTCACTTGTGGCTCCTCGACTGGGGCTGTT |
| | | | | ACATCTGGCAACTACCCAAACTGGGTCCAACAAAAACCAGGTCAGGCA |
| | | | | CCCCGTGGTCTAATAGGTGGGACTAAGTTCCTCGCCCCCGGTACTCCT |
| | | | | GCCAGATTCTCAGGCTCCCTGCTTGGAGGCAAGGCTGCCCTCACCCTC |
| | | | | TCAGGGGTACAGCCAGAGGATGAGGCAGAATATTACTGTGTTCTATGG |
| | | | | TACAGCAACCGCTGGGTGTTCGGTGGAGGAACCAAACTGACTGTCCTA |
| 519. | PMH5E2-VH | artificial | aa | QVQLVQSGAEVKKPGASVKVSCKASGYNFKDTYMDWVKQTPEQGLEWM |
| | | | | GRIDPANGDSKYDPKFQGRVTITADTSTNTAYMELSSLRSEDTAVYYC |
| | | | | ARGGMIWYFDVWGQGTTVTVSS |
| 520. | PMH5E2-HCDR1 | artificial | aa | DTYMD |
| 521. | PMH5E2-HCDR2 | artificial | aa | RIDPANGDSKYDPKFQG |
| 522. | PMH5E2-HCDR3 | artificial | aa | GGMIWYFDV |
| 523. | PMH5E2-VH | artificial | nt | CAGGTGCAGCTGGTCCAGTCTGGGGCAGAGGTTAAGAAGCCAGGGGCC |
| | | | | TCAGTCAAGGTGTCCTGCAAAGCTTCTGGCTACAACTTTAAAGACACC |
| | | | | TATATGGACTGGGTGAAGCAGACGCCTGAACAGGGCCTGGAATGGATG |
| | | | | GGAAGGATTGATCCTGCGAATGGTGATAGTAAATATGACCCGAAATTC |
| | | | | CAGGGCAGGGTCACTATAACAGCAGACACATCCACCAACACAGCCTAC |
| | | | | ATGGAGCTCAGCAGCCTGAGATCTGAGGACACTGCCGTCTATTATTGT |
| | | | | GCTAGAGGCGGGATGATATGGTACTTCGATGTCTGGGGCCAAGGGACC |
| | | | | ACGGTCACCGTCTCCTCA |
| 524. | PMH5E2-VL | artificial | aa | EIVLTQSPATMSVSPGERATLSCSASSSISSNYLHWYQQKPGLPPRLL |
| | | | | IYRTSNLASGIPDRFSGSGSGTDFTLTISRLEAEDFATYYCQQGSSLP |
| | | | | YTFGQGTKLEIK |
| 525. | PMH5E2-LCDR1 | artificial | aa | SASSSISSNYLH |
| 526. | PMH5E2-LCDR2 | artificial | aa | RTSNLAS |
| 527. | PMH5E2-LCDR3 | artificial | aa | QQGSSLPYT |
| 528. | PMH5E2-VL | artificial | nt | GAGATCGTGCTCACCCAGTCTCCAGCCACCATGTCTGTATCTCCCGGG |
| | | | | GAGAGGGCCACTCTCTCCTGCAGTGCCAGCTCAAGTATAAGTTCCAAT |
| | | | | TACTTGCATTGGTATCAGCAGAAGCCAGGATTGCCCCCTAGACTCTTG |
| | | | | ATTTATAGGACATCCAATCTGGCTTCTGGAATCCCAGATCGCTTCAGT |
| | | | | GGCAGTGGGTCTGGGACCGATTTCACTCTCACAATTAGCAGGCTGGAG |
| | | | | GCTGAAGATTTTGCCACTTACTACTGCCAGCAGGGTAGTAGTTTACCG |
| | | | | TACACGTTCGGACAAGGGACCAAGCTTGAGATCAAA |
| 529. | PMH5E2-VH-VL | artificial | aa | QVQLVQSGAEVKKPGASVKVSCKASGYNFKDTYMDWVKQTPEQGLEWM |
| | | | | GRIDPANGDSKYDPKFQGRVTITADTSTNTAYMELSSLRSEDTAVYYC |
| | | | | ARGGMIWYFDVWGQGTTVTVSSGGGGSGGGGSGGGGSEIVLTQSPATM |
| | | | | SVSPGERATLSCSASSSISSNYLHWYQQKPGLPPRLLIYRTSNLASGI |
| | | | | PDRFSGSGSGTDFTLTISRLEAEDFATYYCQQGSSLPYTFGQGTKLEI |
| | | | | K |
| 530. | PMH5E2-VH-VL | artificial | nt | CAGGTGCAGCTGGTCCAGTCTGGGGCAGAGGTTAAGAAGCCAGGGGCC |
| | | | | TCAGTCAAGGTGTCCTGCAAAGCTTCTGGCTACAACTTTAAAGACACC |
| | | | | TATATGGACTGGGTGAAGCAGACGCCTGAACAGGGCCTGGAATGGATG |
| | | | | GGAAGGATTGATCCTGCGAATGGTGATAGTAAATATGACCCGAAATTC |
| | | | | CAGGGCAGGGTCACTATAACAGCAGACACATCCACCAACACAGCCTAC |
| | | | | ATGGAGCTCAGCAGCCTGAGATCTGAGGACACTGCCGTCTATTATTGT |
| | | | | GCTAGAGGCGGGATGATATGGTACTTCGATGTCTGGGGCCAAGGGACC |
| | | | | ACGGTCACCGTCTCCTCAGGTGGTGGTGGTTCTGGCGGCGGCGGCTCC |
| | | | | GGTGGTGGTGGTTCTGAGATCGTGCTCACCCAGTCTCCAGCCACCATG |
| | | | | TCTGTATCTCCCGGGGAGAGGGCCACTCTCTCCTGCAGTGCCAGCTCA |
| | | | | AGTATAAGTTCCAATTACTTGCATTGGTATCAGCAGAAGCCAGGATTG |
| | | | | CCCCCTAGACTCTTGATTTATAGGACATCCAATCTGGCTTCTGGAATC |
| | | | | CCAGATCGCTTCAGTGGCAGTGGGTCTGGGACCGATTTCACTCTCACA |
| | | | | ATTAGCAGGCTGGAGGCTGAAGATTTTGCCACTTACTACTGCCAGCAG |
| | | | | GGTAGTAGTTTACCGTACACGTTCGGACAAGGGACCAAGCTTGAGATC |
| | | | | AAA |
| 531. | PMH5E2 VH-VL × I2C | artificial | aa | QVQLVQSGAEVKKPGASVKVSCKASGYNFKDTYMDWVKQTPEQGLEWM |
| | VH-VL | | | GRIDPANGDSKYDPKFQGRVTITADTSTNTAYMELSSLRSEDTAVYYC |
| | | | | ARGGMIWYFDVWGQGTTVTVSSGGGGSGGGGSGGGGSEIVLTQSPATM |
| | | | | SVSPGERATLSCSASSSISSNYLHWYQQKPGLPPRLLIYRTSNLASGI |
| | | | | PDRFSGSGSGTDFTLTISRLEAEDFATYYCQQGSSLPYTFGQGTKLEI |
| | | | | KSGGGGSEVQLVESGGGLVQPGGSLKLSCAASGFTFNKYAMNWVRQAP |
| | | | | GKGLEWVARIRSKYNNYATYYADSVKDRFTISRDDSKNTAYLQMNNLK |
| | | | | TEDTAVYYCVRHGNFGNSYISYWAYWGQGTLVTVSSGGGGSGGGGSGG |
| | | | | GGSQTVVTQEPSLTVSPGGTVTLTCGSSTGAVTSGNYPNWVQQKPGQA |
| | | | | PRGLIGGTKFLAPGTPARFSGSLLGGKAALTLSGVQPEDEAEYYCVLW |
| | | | | YSNRWVFGGGTKLTVL |
| 532. | PMH5E2 VH-VL × I2C | artificial | nt | CAGGTGCAGCTGGTCCAGTCTGGGGCAGAGGTTAAGAAGCCAGGGGCC |
| | VH-VL | | | TCAGTCAAGGTGTCCTGCAAAGCTTCTGGCTACAACTTTAAAGACACC |
| | | | | TATATGGACTGGGTGAAGCAGACGCCTGAACAGGGCCTGGAATGGATG |
| | | | | GGAAGGATTGATCCTGCGAATGGTGATAGTAAATATGACCCGAAATTC |
| | | | | CAGGGCAGGGTCACTATAACAGCAGACACATCCACCAACACAGCCTAC |
| | | | | ATGGAGCTCAGCAGCCTGAGATCTGAGGACACTGCCGTCTATTATTGT |
| | | | | GCTAGAGGCGGGATGATATGGTACTTCGATGTCTGGGGCCAAGGGACC |
| | | | | ACGGTCACCGTCTCCTCAGGTGGTGGTGGTTCTGGCGGCGGCGGCTCC |
| | | | | GGTGGTGGTGGTTCTGAGATCGTGCTCACCCAGTCTCCAGCCACCATG |
| | | | | TCTGTATCTCCCGGGGAGAGGGCCACTCTCTCCTGCAGTGCCAGCTCA |
| | | | | AGTATAAGTTCCAATTACTTGCATTGGTATCAGCAGAAGCCAGGATTG |
| | | | | CCCCCTAGACTCTTGATTTATAGGACATCCAATCTGGCTTCTGGAATC |
| | | | | CCAGATCGCTTCAGTGGCAGTGGGTCTGGGACCGATTTCACTCTCACA |
| | | | | ATTAGCAGGCTGGAGGCTGAAGATTTTGCCACTTACTACTGCCAGCAG |
| | | | | GGTAGTAGTTTACCGTACACGTTCGGACAAGGGACCAAGCTTGAGATC |
| | | | | AAATCCGGAGGTGGTGGATCCGAGGTGCAGCTGGTCGAGTCTGGAGGA |
| | | | | GGATTGGTGCAGCCTGGAGGGTCATTGAAACTCTCATGTGCAGCCTCT |
| | | | | GGATTCACCTTCAATAAGTACGCCATGAACTGGGTCCGCCAGGCTCCA |
| | | | | GGAAAGGGTTTGGAATGGGTTGCTCGCATAAGAAGTAAATATAATAAT |
| | | | | TATGCAACATATTATGCCGATTCAGTGAAAGACAGGTTCACCATCTCC |
| | | | | AGAGATGATTCAAAAAACACTGCCTATCTACAAATGAACAACTTGAAA |
| | | | | ACTGAGGACACTGCCGTGTACTACTGTGTGAGACATGGGAACTTCGGT |
| | | | | AATAGCTACATATCCTACTGGGCTTACTGGGGCCAAGGGACTCTGGTC |
| | | | | ACCGTCTCCTCAGGTGGTGGTGGTTCTGGCGGCGGCGGCTCCGGTGGT |
| | | | | GGTGGTTCTCAGACTGTTGTGACTCAGGAACCTTCACTCACCGTATCA |
| | | | | CCTGGTGGAACAGTCACACTCACTTGTGGCTCCTCGACTGGGGCTGTT |
| | | | | ACATCTGGCAACTACCCAAACTGGGTCCAACAAAAACCAGGTCAGGCA |
| | | | | CCCCGTGGTCTAATAGGTGGGACTAAGTTCCTCGCCCCCGGTACTCCT |
| | | | | GCCAGATTCTCAGGCTCCCTGCTTGGAGGCAAGGCTGCCCTCACCCTC |
| | | | | TCAGGGGTACAGCCAGAGGATGAGGCAGAATATTACTGTGTTCTATGG |
| | | | | TACAGCAACCGCTGGGTGTTCGGTGGAGGAACCAAACTGACTGTCCTA |
| 533. | PMH8E2-VH | artificial | aa | QVQLVQSGAEVVKPGASVKLSCKASGFTITDTYMDWVRQAPGQGLEWI |
| | | | | GRIDPANGDSKYDPKFQGRATITPDTSTNTVYMELSSLRSEDTAVYYC |
| | | | | ARGGMIWYFDVWGQGTTVTVSS |
| 534. | PMH8E2-HCDR1 | artificial | aa | DTYMD |
| 535. | PMH8E2-HCDR2 | artificial | aa | RIDPANGDSKYDPKFQG |
| 536. | PMH8E2-HCDR3 | artificial | aa | GGMIWYFDV |
| 537. | PMH8E2-VH | artificial | nt | CAGGTGCAGCTGGTCCAGTCTGGGGCAGAGGTTGTGAAGCCAGGGGCC |
| | | | | TCAGTCAAGTTGTCCTGCAAAGCTTCTGGCTTCACCATTACAGACACC |
| | | | | TATATGGACTGGGTGAGGCAGGCGCCTGGACAGGGCCTGGAATGGATT |
| | | | | GGAAGGATTGATCCTGCGAATGGTGATAGTAAATATGACCCGAAATTC |
| | | | | CAGGGCAGGGCCACTATAACACCAGACACATCCACCAACACAGTCTAC |
| | | | | ATGGAGCTCAGCAGCCTGAGATCTGAGGACACTGCCGTCTATTATTGT |
| | | | | GCTAGAGGCGGGATGATATGGTACTTCGATGTCTGGGGCCAAGGGACC |
| | | | | ACGGTCACCGTCTCCTCA |
| 538. | PMH8E2-VL | artificial | aa | EIVLTQSPATMSVSPGERATLSCSASSSISSNYLHWYQQKPGLPPRLL |
| | | | | IYRTSNLASGIPDRFSGSGSGTDFTLTISRLEAEDFATYYCQQGSSLP |
| | | | | YTFGQGTKLEIK |
| 539. | PMH8E2-LCDR1 | artificial | aa | SASSSISSNYLH |
| 540. | PMH8E2-LCDR2 | artificial | aa | RTSNLAS |
| 541. | PMH8E2-LCDR3 | artificial | aa | QQGSSLPYT |
| 542. | PMH8E2-VL | artificial | nt | GAGATCGTGCTCACCCAGTCTCCAGCCACCATGTCTGTATCTCCCGGG |
| | | | | GAGAGGGCCACTCTCTCCTGCAGTGCCAGCTCAAGTATAAGTTCCAAT |
| | | | | TACTTGCATTGGTATCAGCAGAAGCCAGGATTGCCCCCTAGACTCTTG |
| | | | | ATTTATAGGACATCCAATCTGGCTTCTGGAATCCCAGATCGCTTCAGT |
| | | | | GGCAGTGGGTCTGGGACCGATTTCACTCTCACAATTAGCAGGCTGGAG |
| | | | | GCTGAAGATTTTGCCACTTACTACTGCCAGCAGGGTAGTAGTTTACCG |
| | | | | TACACGTTCGGACAAGGGACCAAGCTTGAGATCAAA |
| 543. | PMH8E2-VH-VL | artificial | aa | QVQLVQSGAEVVKPGASVKLSCKASGFTITDTYMDWVRQAPGQGLEWI |
| | | | | GRIDPANGDSKYDPKFQGRATITPDTSTNTVYMELSSLRSEDTAVYYC |
| | | | | ARGGMIWYFDVWGQGTTVTVSSGGGGSGGGGSGGGGSEIVLTQSPATM |
| | | | | SVSPGERATLSCSASSSISSNYLHWYQQKPGLPPRLLIYRTSNLASGI |
| | | | | PDRFSGSGSGTDFTLTISRLEAEDFATYYCQQGSSLPYTFGQGTKLEI |
| | | | | K |
| 544. | PMH8E2-VH-VL | artificial | nt | CAGGTGCAGCTGGTCCAGTCTGGGGCAGAGGTTGTGAAGCCAGGGGCC |
| | | | | TCAGTCAAGTTGTCCTGCAAAGCTTCTGGCTTCACCATTACAGACACC |
| | | | | TATATGGACTGGGTGAGGCAGGCGCCTGGACAGGGCCTGGAATGGATT |
| | | | | GGAAGGATTGATCCTGCGAATGGTGATAGTAAATATGACCCGAAATTC |
| | | | | CAGGGCAGGGCCACTATAACACCAGACACATCCACCAACACAGTCTAC |
| | | | | ATGGAGCTCAGCAGCCTGAGATCTGAGGACACTGCCGTCTATTATTGT |
| | | | | GCTAGAGGCGGGATGATATGGTACTTCGATGTCTGGGGCCAAGGGACC |
| | | | | ACGGTCACCGTCTCCTCAGGTGGTGGTGGTTCTGGCGGCGGCGGCTCC |
| | | | | GGTGGTGGTGGTTCTGAGATCGTGCTCACCCAGTCTCCAGCCACCATG |
| | | | | TCTGTATCTCCCGGGGAGAGGGCCACTCTCTCCTGCAGTGCCAGCTCA |
| | | | | AGTATAAGTTCCAATTACTTGCATTGGTATCAGCAGAAGCCAGGATTG |
| | | | | CCCCCTAGACTCTTGATTTATAGGACATCCAATCTGGCTTCTGGAATC |
| | | | | CCAGATCGCTTCAGTGGCAGTGGGTCTGGGACCGATTTCACTCTCACA |
| | | | | ATTAGCAGGCTGGAGGCTGAAGATTTTGCCACTTACTACTGCCAGCAG |
| | | | | GGTAGTAGTTTACCGTACACGTTCGGACAAGGGACCAAGCTTGAGATC |
| | | | | AAA |
| 545. | PMH8E2 VH-VL × I2C | artificial | aa | QVQLVQSGAEVVKPGASVKLSCKASGFTITDTYMDWVRQAPGQGLEWI |
| | VH-VL | | | GRIDPANGDSKYDPKFQGRATITPDTSTNTVYMELSSLRSEDTAVYYC |
| | | | | ARGGMIWYFDVWGQGTTVTVSSGGGGSGGGGSGGGGSEIVLTQSPATM |
| | | | | SVSPGERATLSCSASSSISSNYLHWYQQKPGLPPRLLIYRTSNLASGI |
| | | | | PDRFSGSGSGTDFTLTISRLEAEDFATYYCQQGSSLPYTFGQGTKLEI |
| | | | | KSGGGGSEVQLVESGGGLVQPGGSLKLSCAASGFTFNKYAMNWVRQAP |
| | | | | GKGLEWVARIRSKYNNYATYYADSVKDRFTISRDDSKNTAYLQMNNLK |
| | | | | TEDTAVYYCVRHGNFGNSYISYWAYWGQGTLVTVSSGGGGSGGGGSGG |
| | | | | GGSQTVVTQEPSLTVSPGGTVTLTCGSSTGAVTSGNYPNWVQQKPGQA |
| | | | | PRGLIGGTKFLAPGTPARFSGSLLGGKAALTLSGVQPEDEAEYYCVLW |
| | | | | YSNRWVFGGGTKLTVL |
| 546. | PMH8E2 VH-VL × I2C | artificial | nt | CAGGTGCAGCTGGTCCAGTCTGGGGCAGAGGTTGTGAAGCCAGGGGCC |
| | VH-VL | | | TCAGTCAAGTTGTCCTGCAAAGCTTCTGGCTTCACCATTACAGACACC |
| | | | | TATATGGACTGGGTGAGGCAGGCGCCTGGACAGGGCCTGGAATGGATT |
| | | | | GGAAGGATTGATCCTGCGAATGGTGATAGTAAATATGACCCGAAATTC |
| | | | | CAGGGCAGGGCCACTATAACACCAGACACATCCACCAACACAGTCTAC |
| | | | | ATGGAGCTCAGCAGCCTGAGATCTGAGGACACTGCCGTCTATTATTGT |
| | | | | GCTAGAGGCGGGATGATATGGTACTTCGATGTCTGGGGCCAAGGGACC |
| | | | | ACGGTCACCGTCTCCTCAGGTGGTGGTGGTTCTGGCGGCGGCGGCTCC |
| | | | | GGTGGTGGTGGTTCTGAGATCGTGCTCACCCAGTCTCCAGCCACCATG |
| | | | | TCTGTATCTCCCGGGGAGAGGGCCACTCTCTCCTGCAGTGCCAGCTCA |
| | | | | AGTATAAGTTCCAATTACTTGCATTGGTATCAGCAGAAGCCAGGATTG |
| | | | | CCCCCTAGACTCTTGATTTATAGGACATCCAATCTGGCTTCTGGAATC |
| | | | | CCAGATCGCTTCAGTGGCAGTGGGTCTGGGACCGATTTCACTCTCACA |
| | | | | ATTAGCAGGCTGGAGGCTGAAGATTTTGCCACTTACTACTGCCAGCAG |
| | | | | GGTAGTAGTTTACCGTACACGTTCGGACAAGGGACCAAGCTTGAGATC |
| | | | | AAATCCGGAGGTGGTGGATCCGAGGTGCAGCTGGTCGAGTCTGGAGGA |
| | | | | GGATTGGTGCAGCCTGGAGGGTCATTGAAACTCTCATGTGCAGCCTCT |
| | | | | GGATTCACCTTCAATAAGTACGCCATGAACTGGGTCCGCCAGGCTCCA |
| | | | | GGAAAGGGTTTGGAATGGGTTGCTCGCATAAGAAGTAAATATAATAAT |
| | | | | TATGCAACATATTATGCCGATTCAGTGAAAGACAGGTTCACCATCTCC |
| | | | | AGAGATGATTCAAAAAACACTGCCTATCTACAAATGAACAACTTGAAA |
| | | | | ACTGAGGACACTGCCGTGTACTACTGTGTGAGACATGGGAACTTCGGT |
| | | | | AATAGCTACATATCCTACTGGGCTTACTGGGGCCAAGGGACTCTGGTC |
| | | | | ACCGTCTCCTCAGGTGGTGGTGGTTCTGGCGGCGGCGGCTCCGGTGGT |
| | | | | GGTGGTTCTCAGACTGTTGTGACTCAGGAACCTTCACTCACCGTATCA |
| | | | | CCTGGTGGAACAGTCACACTCACTTGTGGCTCCTCGACTGGGGCTGTT |
| | | | | ACATCTGGCAACTACCCAAACTGGGTCCAACAAAAACCAGGTCAGGCA |
| | | | | CCCCGTGGTCTAATAGGTGGGACTAAGTTCCTCGCCCCCGGTACTCCT |
| | | | | GCCAGATTCTCAGGCTCCCTGCTTGGAGGCAAGGCTGCCCTCACCCTC |
| | | | | TCAGGGGTACAGCCAGAGGATGAGGCAGAATATTACTGTGTTCTATGG |
| | | | | TACAGCAACCGCTGGGTGTTCGGTGGAGGAACCAAACTGACTGTCCTA |
| 547. | PMH8E4-VH | artificial | aa | QVQLVQSGAEVVKPGASVKLSCKASGFTITDTYMDWVRQAPGQGLEWI |
| | | | | GRIDPANGDSKYDPKFQGRATITPDTSTNTVYMELSSLRSEDTAVYYC |
| | | | | ARGGMIWYFDVWGQGTTVTVSS |
| 548. | PMH8E4-HCDR1 | artificial | aa | DTYMD |
| 549. | PMH8E4-HCDR2 | artificial | aa | RIDPANGDSKYDPKFQG |
| 550. | PMH8E4-HCDR3 | artificial | aa | GGMIWYFDV |
| 551. | PMH8E4-VH | artificial | nt | CAGGTGCAGCTGGTCCAGTCTGGGGCAGAGGTTGTGAAGCCAGGGGCC |
| | | | | TCAGTCAAGTTGTCCTGCAAAGCTTCTGGCTTCACCATTACAGACACC |
| | | | | TATATGGACTGGGTGAGGCAGGCGCCTGGACAGGGCCTGGAATGGATT |
| | | | | GGAAGGATTGATCCTGCGAATGGTGATAGTAAATATGACCCGAAATTC |
| | | | | CAGGGCAGGGCCACTATAACACCAGACACATCCACCAACACAGTCTAC |
| | | | | ATGGAGCTCAGCAGCCTGAGATCTGAGGACACTGCCGTCTATTATTGT |
| | | | | GCTAGAGGCGGGATGATATGGTACTTCGATGTCTGGGGCCAAGGGACC |
| | | | | ACGGTCACCGTCTCCTCA |
| 552. | PMH8E4-VL | artificial | aa | EIVLTQSPATLSLSPGERATLSCSASSSISSNYLHWYQQKPGLPPRLL |
| | | | | IYRTSNLASGIPDRFSGSGSGTDYTLTISRLEPEDFATYYCQQGSSLP |
| | | | | YTFGQGTKLEIK |
| 553. | PMH8E4-LCDR1 | artificial | aa | SASSSISSNYLH |
| 554. | PMH8E4-LCDR2 | artificial | aa | RTSNLAS |
| 555. | PMH8E4-LCDR3 | artificial | aa | QQGSSLPYT |
| 556. | PMH8E4-VL | artificial | nt | GAGATCGTGCTCACCCAGTCTCCAGCCACCCTGTCTCTATCTCCCGGG |
| | | | | GAGAGGGCCACTCTCTCCTGCAGTGCCAGCTCAAGTATAAGTTCCAAT |
| | | | | TACTTGCATTGGTATCAGCAGAAGCCAGGATTGCCCCCTAGACTCTTG |
| | | | | ATTTATAGGACATCCAATCTGGCTTCTGGAATCCCAGATCGCTTCAGT |
| | | | | GGCAGTGGGTCTGGGACCGATTACACTCTCACAATTAGCAGGCTGGAG |
| | | | | CCTGAAGATTTTGCCACTTACTACTGCCAGCAGGGTAGTAGTTTACCG |
| | | | | TACACGTTCGGACAAGGGACCAAGCTTGAGATCAAA |
| 557. | PMH8E4-VH-VL | artificial | aa | QVQLVQSGAEVVKPGASVKLSCKASGFTITDTYMDWVRQAPGQGLEWI |
| | | | | GRIDPANGDSKYDPKFQGRATITPDTSTNTVYMELSSLRSEDTAVYYC |
| | | | | ARGGMIWYFDVWGQGTTVTVSSGGGGSGGGGSGGGGSEIVLTQSPATL |
| | | | | SLSPGERATLSCSASSSISSNYLHWYQQKPGLPPRLLIYRTSNLASGI |
| | | | | PDRFSGSGSGTDYTLTISRLEPEDFATYYCQQGSSLPYTFGQGTKLEI |
| | | | | K |
| 558. | PMH8E4-VH-VL | artificial | nt | CAGGTGCAGCTGGTCCAGTCTGGGGCAGAGGTTGTGAAGCCAGGGGCC |
| | | | | TCAGTCAAGTTGTCCTGCAAAGCTTCTGGCTTCACCATTACAGACACC |
| | | | | TATATGGACTGGGTGAGGCAGGCGCCTGGACAGGGCCTGGAATGGATT |
| | | | | GGAAGGATTGATCCTGCGAATGGTGATAGTAAATATGACCCGAAATTC |
| | | | | CAGGGCAGGGCCACTATAACACCAGACACATCCACCAACACAGTCTAC |
| | | | | ATGGAGCTCAGCAGCCTGAGATCTGAGGACACTGCCGTCTATTATTGT |
| | | | | GCTAGAGGCGGGATGATATGGTACTTCGATGTCTGGGGCCAAGGGACC |
| | | | | ACGGTCACCGTCTCCTCAGGTGGTGGTGGTTCTGGCGGCGGCGGCTCC |
| | | | | GGTGGTGGTGGTTCTGAGATCGTGCTCACCCAGTCTCCAGCCACCCTG |
| | | | | TCTCTATCTCCCGGGGAGAGGGCCACTCTCTCCTGCAGTGCCAGCTCA |
| | | | | AGTATAAGTTCCAATTACTTGCATTGGTATCAGCAGAAGCCAGGATTG |
| | | | | CCCCCTAGACTCTTGATTTATAGGACATCCAATCTGGCTTCTGGAATC |
| | | | | CCAGATCGCTTCAGTGGCAGTGGGTCTGGGACCGATTACACTCTCACA |
| | | | | ATTAGCAGGCTGGAGCCTGAAGATTTTGCCACTTACTACTGCCAGCAG |
| | | | | GGTAGTAGTTTACCGTACACGTTCGGACAAGGGACCAAGCTTGAGATC |
| | | | | AAA |
| 559. | PMH8E4 VH-VL × I2C | artificial | aa | QVQLVQSGAEVVKPGASVKLSCKASGFTITDTYMDWVRQAPGQGLEWI |
| | VH-VL | | | GRIDPANGDSKYDPKFQGRATITPDTSTNTVYMELSSLRSEDTAVYYC |
| | | | | ARGGMIWYFDVWGQGTTVTVSSGGGGSGGGGSGGGGSEIVLTQSPATL |
| | | | | SLSPGERATLSCSASSSISSNYLHWYQQKPGLPPRLLIYRTSNLASGI |
| | | | | PDRFSGSGSGTDYTLTISRLEPEDFATYYCQQGSSLPYTFGQGTKLEI |
| | | | | KSGGGGSEVQLVESGGGLVQPGGSLKLSCAASGFTFNKYAMNWVRQAP |
| | | | | GKGLEWVARIRSKYNNYATYYADSVKDRFTISRDDSKNTAYLQMNNLK |
| | | | | TEDTAVYYCVRHGNFGNSYISYWAYWGQGTLVTVSSGGGGSGGGGSGG |
| | | | | GGSQTVVTQEPSLTVSPGGTVTLTCGSSTGAVTSGNYPNWVQQKPGQA |
| | | | | PRGLIGGTKFLAPGTPARFSGSLLGGKAALTLSGVQPEDEAEYYCVLW |
| | | | | YSNRWVFGGGTKLTVL |
| 560. | PMH8E4 VH-VL × I2C | artificial | nt | CAGGTGCAGCTGGTCCAGTCTGGGGCAGAGGTTGTGAAGCCAGGGGCC |
| | VH-VL | | | TCAGTCAAGTTGTCCTGCAAAGCTTCTGGCTTCACCATTACAGACACC |
| | | | | TATATGGACTGGGTGAGGCAGGCGCCTGGACAGGGCCTGGAATGGATT |
| | | | | GGAAGGATTGATCCTGCGAATGGTGATAGTAAATATGACCCGAAATTC |
| | | | | CAGGGCAGGGCCACTATAACACCAGACACATCCACCAACACAGTCTAC |
| | | | | ATGGAGCTCAGCAGCCTGAGATCTGAGGACACTGCCGTCTATTATTGT |
| | | | | GCTAGAGGCGGGATGATATGGTACTTCGATGTCTGGGGCCAAGGGACC |
| | | | | ACGGTCACCGTCTCCTCAGGTGGTGGTGGTTCTGGCGGCGGCGGCTCC |
| | | | | GGTGGTGGTGGTTCTGAGATCGTGCTCACCCAGTCTCCAGCCACCCTG |
| | | | | TCTCTATCTCCCGGGGAGAGGGCCACTCTCTCCTGCAGTGCCAGCTCA |
| | | | | AGTATAAGTTCCAATTACTTGCATTGGTATCAGCAGAAGCCAGGATTG |
| | | | | CCCCCTAGACTCTTGATTTATAGGACATCCAATCTGGCTTCTGGAATC |
| | | | | CCAGATCGCTTCAGTGGCAGTGGGTCTGGGACCGATTACACTCTCACA |
| | | | | ATTAGCAGGCTGGAGCCTGAAGATTTTGCCACTTACTACTGCCAGCAG |
| | | | | GGTAGTAGTTTACCGTACACGTTCGGACAAGGGACCAAGCTTGAGATC |
| | | | | AAATCCGGAGGTGGTGGATCCGAGGTGCAGCTGGTCGAGTCTGGAGGA |
| | | | | GGATTGGTGCAGCCTGGAGGGTCATTGAAACTCTCATGTGCAGCCTCT |
| | | | | GGATTCACCTTCAATAAGTACGCCATGAACTGGGTCCGCCAGGCTCCA |
| | | | | GGAAAGGGTTTGGAATGGGTTGCTCGCATAAGAAGTAAATATAATAAT |
| | | | | TATGCAACATATTATGCCGATTCAGTGAAAGACAGGTTCACCATCTCC |
| | | | | AGAGATGATTCAAAAAACACTGCCTATCTACAAATGAACAACTTGAAA |
| | | | | ACTGAGGACACTGCCGTGTACTACTGTGTGAGACATGGGAACTTCGGT |
| | | | | AATAGCTACATATCCTACTGGGCTTACTGGGGCCAAGGGACTCTGGTC |
| | | | | ACCGTCTCCTCAGGTGGTGGTGGTTCTGGCGGCGGCGGCTCCGGTGGT |
| | | | | GGTGGTTCTCAGACTGTTGTGACTCAGGAACCTTCACTCACCGTATCA |
| | | | | CCTGGTGGAACAGTCACACTCACTTGTGGCTCCTCGACTGGGGCTGTT |
| | | | | ACATCTGGCAACTACCCAAACTGGGTCCAACAAAAACCAGGTCAGGCA |
| | | | | CCCCGTGGTCTAATAGGTGGGACTAAGTTCCTCGCCCCCGGTACTCCT |
| | | | | GCCAGATTCTCAGGCTCCCTGCTTGGAGGCAAGGCTGCCCTCACCCTC |
| | | | | TCAGGGGTACAGCCAGAGGATGAGGCAGAATATTACTGTGTTCTATGG |
| | | | | TACAGCAACCGCTGGGTGTTCGGTGGAGGAACCAAACTGACTGTCCTA |
| 561. | PMH8G6-VH | artificial | aa | QVQLVQSGAEVVKPGASVKLSCKASGFTITDTYMDWVRQAPGQGLEWI |
| | | | | GRIDPANGDSKYDPKFQGRATITPDTSTNTVYMELSSLRSEDTAVYYC |
| | | | | ARGGMIWYFDVWGQGTTVTVSS |
| 562. | PMH8G6-HCDR1 | artificial | aa | DTYMD |
| 563. | PMH8G6-HCDR2 | artificial | aa | RIDPANGDSKYDPKFQG |
| 564. | PMH8G6-HCDR3 | artificial | aa | GGMIWYFDV |
| 565. | PMH8G6-VH | artificial | nt | CAGGTGCAGCTGGTCCAGTCTGGGGCAGAGGTTGTGAAGCCAGGGGCC |
| | | | | TCAGTCAAGTTGTCCTGCAAAGCTTCTGGCTTCACCATTACAGACACC |
| | | | | TATATGGACTGGGTGAGGCAGGCGCCTGGACAGGGCCTGGAATGGATT |
| | | | | GGAAGGATTGATCCTGCGAATGGTGATAGTAAATATGACCCGAAATTC |
| | | | | CAGGGCAGGGCCACTATAACACCAGACACATCCACCAACACAGTCTAC |
| | | | | ATGGAGCTCAGCAGCCTGAGATCTGAGGACACTGCCGTCTATTATTGT |
| | | | | GCTAGAGGCGGGATGATATGGTACTTCGATGTCTGGGGCCAAGGGACC |
| | | | | ACGGTCACCGTCTCCTCA |
| 566. | PMH8G6-VL | artificial | aa | EIVLTQSPATMSLSPGERATISCSASSSISSNYLHWYQQKPGLPPKLL |
| | | | | IYRTSNLASGIPDRFSGSGSGTDFTLTISRMEPEDFAVYYCQQGSSLP |
| | | | | YTFGQGTKLEIK |
| 567. | PMH8G6-LCDR1 | artificial | aa | SASSSISSNYLH |
| 568. | PMH8G6-LCDR2 | artificial | aa | RTSNLAS |
| 569. | PMH8G6-LCDR3 | artificial | aa | QQGSSLPYT |
| 570. | PMH8G6-VL | artificial | nt | GAGATCGTGCTCACCCAGTCTCCAGCCACCATGTCTCTATCTCCCGGG |
| | | | | GAGAGGGCCACTATCTCCTGCAGTGCCAGCTCAAGTATAAGTTCCAAT |
| | | | | TACTTGCATTGGTATCAGCAGAAGCCAGGATTGCCCCCTAAACTCTTG |
| | | | | ATTTATAGGACATCCAATCTGGCTTCTGGAATCCCAGATCGCTTCAGT |
| | | | | GGCAGTGGGTCTGGGACCGATTTCACTCTCACAATTAGCAGGATGGAG |
| | | | | CCTGAAGATTTTGCCGTTTACTACTGCCAGCAGGGTAGTAGTTTACCG |
| | | | | TACACGTTCGGACAAGGGACCAAGCTTGAGATCAAA |
| 571. | PMH8G6-VH-VL | artificial | aa | QVQLVQSGAEVVKPGASVKLSCKASGFTITDTYMDWVRQAPGQGLEWI |
| | | | | GRIDPANGDSKYDPKFQGRATITPDTSTNTVYMELSSLRSEDTAVYYC |
| | | | | ARGGMIWYFDVWGQGTTVTVSSGGGGSGGGGSGGGGSEIVLTQSPATM |
| | | | | SLSPGERATISCSASSSISSNYLHWYQQKPGLPPKLLIYRTSNLASGI |
| | | | | PDRFSGSGSGTDFTLTISRMEPEDFAVYYCQQGSSLPYTFGQGTKLEI |
| | | | | K |
| 572. | PMH8G6-VH-VL | artificial | nt | CAGGTGCAGCTGGTCCAGTCTGGGGCAGAGGTTGTGAAGCCAGGGGCC |
| | | | | TCAGTCAAGTTGTCCTGCAAAGCTTCTGGCTTCACCATTACAGACACC |
| | | | | TATATGGACTGGGTGAGGCAGGCGCCTGGACAGGGCCTGGAATGGATT |
| | | | | GGAAGGATTGATCCTGCGAATGGTGATAGTAAATATGACCCGAAATTC |
| | | | | CAGGGCAGGGCCACTATAACACCAGACACATCCACCAACACAGTCTAC |
| | | | | ATGGAGCTCAGCAGCCTGAGATCTGAGGACACTGCCGTCTATTATTGT |
| | | | | GCTAGAGGCGGGATGATATGGTACTTCGATGTCTGGGGCCAAGGGACC |
| | | | | ACGGTCACCGTCTCCTCAGGTGGTGGTGGTTCTGGCGGCGGCGGCTCC |
| | | | | GGTGGTGGTGGTTCTGAGATCGTGCTCACCCAGTCTCCAGCCACCATG |
| | | | | TCTCTATCTCCCGGGGAGAGGGCCACTATCTCCTGCAGTGCCAGCTCA |
| | | | | AGTATAAGTTCCAATTACTTGCATTGGTATCAGCAGAAGCCAGGATTG |
| | | | | CCCCCTAAACTCTTGATTTATAGGACATCCAATCTGGCTTCTGGAATC |
| | | | | CCAGATCGCTTCAGTGGCAGTGGGTCTGGGACCGATTTCACTCTCACA |
| | | | | ATTAGCAGGATGGAGCCTGAAGATTTTGCCGTTTACTACTGCCAGCAG |
| | | | | GGTAGTAGTTTACCGTACACGTTCGGACAAGGGACCAAGCTTGAGATC |
| | | | | AAA |
| 573. | PMH8G6 VH-VL × I2C | artificial | aa | QVQLVQSGAEVVKPGASVKLSCKASGFTITDTYMDWVRQAPGQGLEWI |
| | VH-VL | | | GRIDPANGDSKYDPKFQGRATITPDTSTNTVYMELSSLRSEDTAVYYC |
| | | | | ARGGMIWYFDVWGQGTTVTVSSGGGGSGGGGSGGGGSEIVLTQSPATM |
| | | | | SLSPGERATISCSASSSISSNYLHWYQQKPGLPPKLLIYRTSNLASGI |
| | | | | PDRFSGSGSGTDFTLTISRMEPEDFAVYYCQQGSSLPYTFGQGTKLEI |
| | | | | KSGGGGSEVQLVESGGGLVQPGGSLKLSCAASGFTFNKYAMNWVRQAP |
| | | | | GKGLEWVARIRSKYNNYATYYADSVKDRFTISRDDSKNTAYLQMNNLK |
| | | | | TEDTAVYYCVRHGNFGNSYISYWAYWGQGTLVTVSSGGGGSGGGGSGG |
| | | | | GGSQTVVTQEPSLTVSPGGTVTLTCGSSTGAVTSGNYPNWVQQKPGQA |
| | | | | PRGLIGGTKFLAPGTPARFSGSLLGGKAALTLSGVQPEDEAEYYCVLW |
| | | | | YSNRWVFGGGTKLTVL |
| 574. | PMH8G6 VH-VL × I2C | artificial | nt | CAGGTGCAGCTGGTCCAGTCTGGGGCAGAGGTTGTGAAGCCAGGGGCC |
| | VH-VL | | | TCAGTCAAGTTGTCCTGCAAAGCTTCTGGCTTCACCATTACAGACACC |
| | | | | TATATGGACTGGGTGAGGCAGGCGCCTGGACAGGGCCTGGAATGGATT |
| | | | | GGAAGGATTGATCCTGCGAATGGTGATAGTAAATATGACCCGAAATTC |
| | | | | CAGGGCAGGGCCACTATAACACCAGACACATCCACCAACACAGTCTAC |
| | | | | ATGGAGCTCAGCAGCCTGAGATCTGAGGACACTGCCGTCTATTATTGT |
| | | | | GCTAGAGGCGGGATGATATGGTACTTCGATGTCTGGGGCCAAGGGACC |
| | | | | ACGGTCACCGTCTCCTCAGGTGGTGGTGGTTCTGGCGGCGGCGGCTCC |
| | | | | GGTGGTGGTGGTTCTGAGATCGTGCTCACCCAGTCTCCAGCCACCATG |
| | | | | TCTCTATCTCCCGGGGAGAGGGCCACTATCTCCTGCAGTGCCAGCTCA |
| | | | | AGTATAAGTTCCAATTACTTGCATTGGTATCAGCAGAAGCCAGGATTG |
| | | | | CCCCCTAAACTCTTGATTTATAGGACATCCAATCTGGCTTCTGGAATC |
| | | | | CCAGATCGCTTCAGTGGCAGTGGGTCTGGGACCGATTTCACTCTCACA |
| | | | | ATTAGCAGGATGGAGCCTGAAGATTTTGCCGTTTACTACTGCCAGCAG |
| | | | | GGTAGTAGTTTACCGTACACGTTCGGACAAGGGACCAAGCTTGAGATC |
| | | | | AAATCCGGAGGTGGTGGATCCGAGGTGCAGCTGGTCGAGTCTGGAGGA |
| | | | | GGATTGGTGCAGCCTGGAGGGTCATTGAAACTCTCATGTGCAGCCTCT |
| | | | | GGATTCACCTTCAATAAGTACGCCATGAACTGGGTCCGCCAGGCTCCA |
| | | | | GGAAAGGGTTTGGAATGGGTTGCTCGCATAAGAAGTAAATATAATAAT |
| | | | | TATGCAACATATTATGCCGATTCAGTGAAAGACAGGTTCACCATCTCC |
| | | | | AGAGATGATTCAAAAAACACTGCCTATCTACAAATGAACAACTTGAAA |
| | | | | ACTGAGGACACTGCCGTGTACTACTGTGTGAGACATGGGAACTTCGGT |
| | | | | AATAGCTACATATCCTACTGGGCTTACTGGGGCCAAGGGACTCTGGTC |
| | | | | ACCGTCTCCTCAGGTGGTGGTGGTTCTGGCGGCGGCGGCTCCGGTGGT |
| | | | | GGTGGTTCTCAGACTGTTGTGACTCAGGAACCTTCACTCACCGTATCA |
| | | | | CCTGGTGGAACAGTCACACTCACTTGTGGCTCCTCGACTGGGGCTGTT |
| | | | | ACATCTGGCAACTACCCAAACTGGGTCCAACAAAAACCAGGTCAGGCA |
| | | | | CCCCGTGGTCTAATAGGTGGGACTAAGTTCCTCGCCCCCGGTACTCCT |
| | | | | GCCAGATTCTCAGGCTCCCTGCTTGGAGGCAAGGCTGCCCTCACCCTC |
| | | | | TCAGGGGTACAGCCAGAGGATGAGGCAGAATATTACTGTGTTCTATGG |
| | | | | TACAGCAACCGCTGGGTGTTCGGTGGAGGAACCAAACTGACTGTCCTA |
| 575. | PMH5H2-VH | artificial | aa | QVQLVQSGAEVKKPGASVKVSCKASGYNFKDTYMDWVKQTPEQGLEWM |
| | | | | GRIDPANGDSKYDPKFQGRVTITADTSTNTAYMELSSLRSEDTAVYYC |
| | | | | ARGGMIWYFDVWGQGTTVTVSS |
| 576. | PMH5H2-HCDR1 | artificial | aa | DTYMD |
| 577. | PMH5H2-HCDR2 | artificial | aa | RIDPANGDSKYDPKFQG |
| 578. | PMH5H2-HCDR3 | artificial | aa | GGMIWYFDV |
| 579. | PMH5H2-VH | artificial | nt | CAGGTGCAGCTGGTCCAGTCTGGGGCAGAGGTTAAGAAGCCAGGGGCC |
| | | | | TCAGTCAAGGTGTCCTGCAAAGCTTCTGGCTACAACTTTAAAGACACC |
| | | | | TATATGGACTGGGTGAAGCAGACGCCTGAACAGGGCCTGGAATGGATG |
| | | | | GGAAGGATTGATCCTGCGAATGGTGATAGTAAATATGACCCGAAATTC |
| | | | | CAGGGCAGGGTCACTATAACAGCAGACACATCCACCAACACAGCCTAC |
| | | | | ATGGAGCTCAGCAGCCTGAGATCTGAGGACACTGCCGTCTATTATTGT |
| | | | | GCTAGAGGCGGGATGATATGGTACTTCGATGTCTGGGGCCAAGGGACC |
| | | | | ACGGTCACCGTCTCCTCA |
| 580. | PMH5H2-VL | artificial | aa | EIVLTQSPATMALSPGERATLSCSASSSISSNYLHWYQQKPGLPPRLL |
| | | | | IYRTSNLASGIPDRFSGSGSGTDFTLTISRLEPEDVAVYYCQQGSSLP |
| | | | | YTFGQGTKLEIK |
| 581. | PMH5H2-LCDR1 | artificial | aa | SASSSISSNYLH |
| 582. | PMH5H2-LCDR2 | artificial | aa | RTSNLAS |
| 583. | PMH5H2-LCDR3 | artificial | aa | QQGSSLPYT |
| 584. | PMH5H2-VL | artificial | nt | GAGATCGTGCTCACCCAGTCTCCAGCCACCATGGCTCTATCTCCCGGG |
| | | | | GAGAGGGCCACTCTCTCCTGCAGTGCCAGCTCAAGTATAAGTTCCAAT |
| | | | | TACTTGCATTGGTATCAGCAGAAGCCAGGATTGCCCCCTAGACTCTTG |
| | | | | ATTTATAGGACATCCAATCTGGCTTCTGGAATCCCAGATCGCTTCAGT |
| | | | | GGCAGTGGGTCTGGGACCGATTTCACTCTCACAATTAGCAGGCTGGAG |
| | | | | CCTGAAGATGTTGCCGTTTACTACTGCCAGCAGGGTAGTAGTTTACCG |
| | | | | TACACGTTCGGACAAGGGACCAAGCTTGAGATCAAA |
| 585. | PMH5H2-VH-VL | artificial | aa | QVQLVQSGAEVKKPGASVKVSCKASGYNFKDTYMDWVKQTPEQGLEWM |
| | | | | GRIDPANGDSKYDPKFQGRVTITADTSTNTAYMELSSLRSEDTAVYYC |
| | | | | ARGGMIWYFDVWGQGTTVTVSSGGGGSGGGGSGGGGSEIVLTQSPATM |
| | | | | ALSPGERATLSCSASSSISSNYLHWYQQKPGLPPRLLIYRTSNLASGI |
| | | | | PDRFSGSGSGTDFTLTISRLEPEDVAVYYCQQGSSLPYTFGQGTKLEI |
| | | | | K |
| 586. | PMH5H2-VH-VL | artificial | nt | CAGGTGCAGCTGGTCCAGTCTGGGGCAGAGGTTAAGAAGCCAGGGGCC |
| | | | | TCAGTCAAGGTGTCCTGCAAAGCTTCTGGCTACAACTTTAAAGACACC |
| | | | | TATATGGACTGGGTGAAGCAGACGCCTGAACAGGGCCTGGAATGGATG |
| | | | | GGAAGGATTGATCCTGCGAATGGTGATAGTAAATATGACCCGAAATTC |
| | | | | CAGGGCAGGGTCACTATAACAGCAGACACATCCACCAACACAGCCTAC |
| | | | | ATGGAGCTCAGCAGCCTGAGATCTGAGGACACTGCCGTCTATTATTGT |
| | | | | GCTAGAGGCGGGATGATATGGTACTTCGATGTCTGGGGCCAAGGGACC |
| | | | | ACGGTCACCGTCTCCTCAGGTGGTGGTGGTTCTGGCGGCGGCGGCTCC |
| | | | | GGTGGTGGTGGTTCTGAGATCGTGCTCACCCAGTCTCCAGCCACCATG |
| | | | | GCTCTATCTCCCGGGGAGAGGGCCACTCTCTCCTGCAGTGCCAGCTCA |
| | | | | AGTATAAGTTCCAATTACTTGCATTGGTATCAGCAGAAGCCAGGATTG |
| | | | | CCCCCTAGACTCTTGATTTATAGGACATCCAATCTGGCTTCTGGAATC |
| | | | | CCAGATCGCTTCAGTGGCAGTGGGTCTGGGACCGATTTCACTCTCACA |
| | | | | ATTAGCAGGCTGGAGCCTGAAGATGTTGCCGTTTACTACTGCCAGCAG |
| | | | | GGTAGTAGTTTACCGTACACGTTCGGACAAGGGACCAAGCTTGAGATC |
| | | | | AAA |
| 587. | PMH5H2 VH-VL × I2C | artificial | aa | QVQLVQSGAEVKKPGASVKVSCKASGYNFKDTYMDWVKQTPEQGLEWM |
| | VH-VL | | | GRIDPANGDSKYDPKFQGRVTITADTSTNTAYMELSSLRSEDTAVYYC |
| | | | | ARGGMIWYFDVWGQGTTVTVSSGGGGSGGGGSGGGGSEIVLTQSPATM |
| | | | | ALSPGERATLSCSASSSISSNYLHWYQQKPGLPPRLLIYRTSNLASGI |
| | | | | PDRFSGSGSGTDFTLTISRLEPEDVAVYYCQQGSSLPYTFGQGTKLEI |
| | | | | KSGGGGSEVQLVESGGGLVQPGGSLKLSCAASGFTFNKYAMNWVRQAP |
| | | | | GKGLEWVARIRSKYNNYATYYADSVKDRFTISRDDSKNTAYLQMNNLK |
| | | | | TEDTAVYYCVRHGNFGNSYISYWAYWGQGTLVTVSSGGGGSGGGGSGG |
| | | | | GGSQTVVTQEPSLTVSPGGTVTLTCGSSTGAVTSGNYPNWVQQKPGQA |
| | | | | PRGLIGGTKFLAPGTPARFSGSLLGGKAALTLSGVQPEDEAEYYCVLW |
| | | | | YSNRWVFGGGTKLTVL |
| 588. | PMH5H2 VH-VL × I2C | artificial | nt | CAGGTGCAGCTGGTCCAGTCTGGGGCAGAGGTTAAGAAGCCAGGGGCC |
| | VH-VL | | | TCAGTCAAGGTGTCCTGCAAAGCTTCTGGCTACAACTTTAAAGACACC |
| | | | | TATATGGACTGGGTGAAGCAGACGCCTGAACAGGGCCTGGAATGGATG |
| | | | | GGAAGGATTGATCCTGCGAATGGTGATAGTAAATATGACCCGAAATTC |
| | | | | CAGGGCAGGGTCACTATAACAGCAGACACATCCACCAACACAGCCTAC |
| | | | | ATGGAGCTCAGCAGCCTGAGATCTGAGGACACTGCCGTCTATTATTGT |
| | | | | GCTAGAGGCGGGATGATATGGTACTTCGATGTCTGGGGCCAAGGGACC |
| | | | | ACGGTCACCGTCTCCTCAGGTGGTGGTGGTTCTGGCGGCGGCGGCTCC |
| | | | | GGTGGTGGTGGTTCTGAGATCGTGCTCACCCAGTCTCCAGCCACCATG |
| | | | | GCTCTATCTCCCGGGGAGAGGGCCACTCTCTCCTGCAGTGCCAGCTCA |
| | | | | AGTATAAGTTCCAATTACTTGCATTGGTATCAGCAGAAGCCAGGATTG |
| | | | | CCCCCTAGACTCTTGATTTATAGGACATCCAATCTGGCTTCTGGAATC |
| | | | | CCAGATCGCTTCAGTGGCAGTGGGTCTGGGACCGATTTCACTCTCACA |
| | | | | ATTAGCAGGCTGGAGCCTGAAGATGTTGCCGTTTACTACTGCCAGCAG |
| | | | | GGTAGTAGTTTACCGTACACGTTCGGACAAGGGACCAAGCTTGAGATC |
| | | | | AAATCCGGAGGTGGTGGATCCGAGGTGCAGCTGGTCGAGTCTGGAGGA |
| | | | | GGATTGGTGCAGCCTGGAGGGTCATTGAAACTCTCATGTGCAGCCTCT |
| | | | | GGATTCACCTTCAATAAGTACGCCATGAACTGGGTCCGCCAGGCTCCA |
| | | | | GGAAAGGGTTTGGAATGGGTTGCTCGCATAAGAAGTAAATATAATAAT |
| | | | | TATGCAACATATTATGCCGATTCAGTGAAAGACAGGTTCACCATCTCC |
| | | | | AGAGATGATTCAAAAAACACTGCCTATCTACAAATGAACAACTTGAAA |
| | | | | ACTGAGGACACTGCCGTGTACTACTGTGTGAGACATGGGAACTTCGGT |
| | | | | AATAGCTACATATCCTACTGGGCTTACTGGGGCCAAGGGACTCTGGTC |
| | | | | ACCGTCTCCTCAGGTGGTGGTGGTTCTGGCGGCGGCGGCTCCGGTGGT |
| | | | | GGTGGTTCTCAGACTGTTGTGACTCAGGAACCTTCACTCACCGTATCA |
| | | | | CCTGGTGGAACAGTCACACTCACTTGTGGCTCCTCGACTGGGGCTGTT |
| | | | | ACATCTGGCAACTACCCAAACTGGGTCCAACAAAAACCAGGTCAGGCA |
| | | | | CCCCGTGGTCTAATAGGTGGGACTAAGTTCCTCGCCCCCGGTACTCCT |
| | | | | GCCAGATTCTCAGGCTCCCTGCTTGGAGGCAAGGCTGCCCTCACCCTC |
| | | | | TCAGGGGTACAGCCAGAGGATGAGGCAGAATATTACTGTGTTCTATGG |
| | | | | TACAGCAACCGCTGGGTGTTCGGTGGAGGAACCAAACTGACTGTCCTA |
| 589. | PMH8H2-VH | artificial | aa | QVQLVQSGAEVVKPGASVKLSCKASGFTITDTYMDWVRQAPGQGLEWI |
| | | | | GRIDPANGDSKYDPKFQGRATITPDTSTNTVYMELSSLRSEDTAVYYC |
| | | | | ARGGMIWYFDVWGQGTTVTVSS |
| 590. | PMH8H2-HCDR1 | artificial | aa | DTYMD |
| 591. | PMH8H2-HCDR2 | artificial | aa | RIDPANGDSKYDPKFQG |
| 592. | PMH8H2-HCDR3 | artificial | aa | GGMIWYFDV |
| 593. | PMH8H2-VH | artificial | nt | CAGGTGCAGCTGGTCCAGTCTGGGGCAGAGGTTGTGAAGCCAGGGGCC |
| | | | | TCAGTCAAGTTGTCCTGCAAAGCTTCTGGCTTCACCATTACAGACACC |
| | | | | TATATGGACTGGGTGAGGCAGGCGCCTGGACAGGGCCTGGAATGGATT |
| | | | | GGAAGGATTGATCCTGCGAATGGTGATAGTAAATATGACCCGAAATTC |
| | | | | CAGGGCAGGGCCACTATAACACCAGACACATCCACCAACACAGTCTAC |
| | | | | ATGGAGCTCAGCAGCCTGAGATCTGAGGACACTGCCGTCTATTATTGT |
| | | | | GCTAGAGGCGGGATGATATGGTACTTCGATGTCTGGGGCCAAGGGACC |
| | | | | ACGGTCACCGTCTCCTCA |
| 594. | PMH8H2-VL | artificial | aa | EIVLTQSPATMALSPGERATLSCSASSSISSNYLHWYQQKPGLPPRLL |
| | | | | IYRTSNLASGIPDRFSGSGSGTDFTLTISRLEPEDVAVYYCQQGSSLP |
| | | | | YTFGQGTKLEIK |
| 595. | PMH8H2-LCDR1 | artificial | aa | SASSSISSNYLH |
| 596. | PMH8H2-LCDR2 | artificial | aa | RTSNLAS |
| 597. | PMH8H2-LCDR3 | artificial | aa | QQGSSLPYT |
| 598. | PMH8H2-VL | artificial | nt | GAGATCGTGCTCACCCAGTCTCCAGCCACCATGGCTCTATCTCCCGGG |
| | | | | GAGAGGGCCACTCTCTCCTGCAGTGCCAGCTCAAGTATAAGTTCCAAT |
| | | | | TACTTGCATTGGTATCAGCAGAAGCCAGGATTGCCCCCTAGACTCTTG |
| | | | | ATTTATAGGACATCCAATCTGGCTTCTGGAATCCCAGATCGCTTCAGT |
| | | | | GGCAGTGGGTCTGGGACCGATTTCACTCTCACAATTAGCAGGCTGGAG |
| | | | | CCTGAAGATGTTGCCGTTTACTACTGCCAGCAGGGTAGTAGTTTACCG |
| | | | | TACACGTTCGGACAAGGGACCAAGCTTGAGATCAAA |
| 599. | PMH8H2-VH-VL | artificial | aa | QVQLVQSGAEVVKPGASVKLSCKASGFTITDTYMDWVRQAPGQGLEWI |
| | | | | GRIDPANGDSKYDPKFQGRATITPDTSTNTVYMELSSLRSEDTAVYYC |
| | | | | ARGGMIWYFDVWGQGTTVTVSSGGGGSGGGGSGGGGSEIVLTQSPATM |
| | | | | ALSPGERATLSCSASSSISSNYLHWYQQKPGLPPRLLIYRTSNLASGI |
| | | | | PDRFSGSGSGTDFTLTISRLEPEDVAVYYCQQGSSLPYTFGQGTKLEI |
| | | | | K |
| 600. | PMH8H2-VH-VL | artificial | nt | CAGGTGCAGCTGGTCCAGTCTGGGGCAGAGGTTGTGAAGCCAGGGGCC |
| | | | | TCAGTCAAGTTGTCCTGCAAAGCTTCTGGCTTCACCATTACAGACACC |
| | | | | TATATGGACTGGGTGAGGCAGGCGCCTGGACAGGGCCTGGAATGGATT |
| | | | | GGAAGGATTGATCCTGCGAATGGTGATAGTAAATATGACCCGAAATTC |
| | | | | CAGGGCAGGGCCACTATAACACCAGACACATCCACCAACACAGTCTAC |
| | | | | ATGGAGCTCAGCAGCCTGAGATCTGAGGACACTGCCGTCTATTATTGT |
| | | | | GCTAGAGGCGGGATGATATGGTACTTCGATGTCTGGGGCCAAGGGACC |
| | | | | ACGGTCACCGTCTCCTCAGGTGGTGGTGGTTCTGGCGGCGGCGGCTCC |
| | | | | GGTGGTGGTGGTTCTGAGATCGTGCTCACCCAGTCTCCAGCCACCATG |
| | | | | GCTCTATCTCCCGGGGAGAGGGCCACTCTCTCCTGCAGTGCCAGCTCA |
| | | | | AGTATAAGTTCCAATTACTTGCATTGGTATCAGCAGAAGCCAGGATTG |
| | | | | CCCCCTAGACTCTTGATTTATAGGACATCCAATCTGGCTTCTGGAATC |
| | | | | CCAGATCGCTTCAGTGGCAGTGGGTCTGGGACCGATTTCACTCTCACA |
| | | | | ATTAGCAGGCTGGAGCCTGAAGATGTTGCCGTTTACTACTGCCAGCAG |
| | | | | GGTAGTAGTTTACCGTACACGTTCGGACAAGGGACCAAGCTTGAGATC |
| | | | | AAA |
| 601. | PMH8H2 VH-VL × I2C | artificial | aa | QVQLVQSGAEVVKPGASVKLSCKASGFTITDTYMDWVRQAPGQGLEWI |
| | VH-VL | | | GRIDPANGDSKYDPKFQGRATITPDTSTNTVYMELSSLRSEDTAVYYC |
| | | | | ARGGMIWYFDVWGQGTTVTVSSGGGGSGGGGSGGGGSEIVLTQSPATM |
| | | | | ALSPGERATLSCSASSSISSNYLHWYQQKPGLPPRLLIYRTSNLASGI |
| | | | | PDRFSGSGSGTDFTLTISRLEPEDVAVYYCQQGSSLPYTFGQGTKLEI |
| | | | | KSGGGGSEVQLVESGGGLVQPGGSLKLSCAASGFTFNKYAMNWVRQAP |
| | | | | GKGLEWVARIRSKYNNYATYYADSVKDRFTISRDDSKNTAYLQMNNLK |
| | | | | TEDTAVYYCVRHGNFGNSYISYWAYWGQGTLVTVSSGGGGSGGGGSGG |
| | | | | GGSQTVVTQEPSLTVSPGGTVTLTCGSSTGAVTSGNYPNWVQQKPGQA |
| | | | | PRGLIGGTKFLAPGTPARFSGSLLGGKAALTLSGVQPEDEAEYYCVLW |
| | | | | YSNRWVFGGGTKLTVL |
| 602. | PMH8H2 VH-VL × I2C | artificial | nt | CAGGTGCAGCTGGTCCAGTCTGGGGCAGAGGTTGTGAAGCCAGGGGCC |
| | VH-VL | | | TCAGTCAAGTTGTCCTGCAAAGCTTCTGGCTTCACCATTACAGACACC |
| | | | | TATATGGACTGGGTGAGGCAGGCGCCTGGACAGGGCCTGGAATGGATT |
| | | | | GGAAGGATTGATCCTGCGAATGGTGATAGTAAATATGACCCGAAATTC |
| | | | | CAGGGCAGGGCCACTATAACACCAGACACATCCACCAACACAGTCTAC |
| | | | | ATGGAGCTCAGCAGCCTGAGATCTGAGGACACTGCCGTCTATTATTGT |
| | | | | GCTAGAGGCGGGATGATATGGTACTTCGATGTCTGGGGCCAAGGGACC |
| | | | | ACGGTCACCGTCTCCTCAGGTGGTGGTGGTTCTGGCGGCGGCGGCTCC |
| | | | | GGTGGTGGTGGTTCTGAGATCGTGCTCACCCAGTCTCCAGCCACCATG |
| | | | | GCTCTATCTCCCGGGGAGAGGGCCACTCTCTCCTGCAGTGCCAGCTCA |
| | | | | AGTATAAGTTCCAATTACTTGCATTGGTATCAGCAGAAGCCAGGATTG |
| | | | | CCCCCTAGACTCTTGATTTATAGGACATCCAATCTGGCTTCTGGAATC |
| | | | | CCAGATCGCTTCAGTGGCAGTGGGTCTGGGACCGATTTCACTCTCACA |
| | | | | ATTAGCAGGCTGGAGCCTGAAGATGTTGCCGTTTACTACTGCCAGCAG |
| | | | | GGTAGTAGTTTACCGTACACGTTCGGACAAGGGACCAAGCTTGAGATC |
| | | | | AAATCCGGAGGTGGTGGATCCGAGGTGCAGCTGGTCGAGTCTGGAGGA |
| | | | | GGATTGGTGCAGCCTGGAGGGTCATTGAAACTCTCATGTGCAGCCTCT |
| | | | | GGATTCACCTTCAATAAGTACGCCATGAACTGGGTCCGCCAGGCTCCA |
| | | | | GGAAAGGGTTTGGAATGGGTTGCTCGCATAAGAAGTAAATATAATAAT |
| | | | | TATGCAACATATTATGCCGATTCAGTGAAAGACAGGTTCACCATCTCC |
| | | | | AGAGATGATTCAAAAAACACTGCCTATCTACAAATGAACAACTTGAAA |
| | | | | ACTGAGGACACTGCCGTGTACTACTGTGTGAGACATGGGAACTTCGGT |
| | | | | AATAGCTACATATCCTACTGGGCTTACTGGGGCCAAGGGACTCTGGTC |
| | | | | ACCGTCTCCTCAGGTGGTGGTGGTTCTGGCGGCGGCGGCTCCGGTGGT |
| | | | | GGTGGTTCTCAGACTGTTGTGACTCAGGAACCTTCACTCACCGTATCA |
| | | | | CCTGGTGGAACAGTCACACTCACTTGTGGCTCCTCGACTGGGGCTGTT |
| | | | | ACATCTGGCAACTACCCAAACTGGGTCCAACAAAAACCAGGTCAGGCA |
| | | | | CCCCGTGGTCTAATAGGTGGGACTAAGTTCCTCGCCCCCGGTACTCCT |
| | | | | GCCAGATTCTCAGGCTCCCTGCTTGGAGGCAAGGCTGCCCTCACCCTC |
| | | | | TCAGGGGTACAGCCAGAGGATGAGGCAGAATATTACTGTGTTCTATGG |
| | | | | TACAGCAACCGCTGGGTGTTCGGTGGAGGAACCAAACTGACTGTCCTA |
| 603. | PMH8H3-VH | artificial | aa | QVQLVQSGAEVVKPGASVKLSCKASGFTITDTYMDWVRQAPGQGLEWI |
| | | | | GRIDPANGDSKYDPKFQGRATITPDTSTNTVYMELSSLRSEDTAVYYC |
| | | | | ARGGMIWYFDVWGQGTTVTVSS |
| 604. | PMH8H3-HCDR1 | artificial | aa | DTYMD |
| 605. | PMH8H3-HCDR2 | artificial | aa | RIDPANGDSKYDPKFQG |
| 606. | PMH8H3-HCDR3 | artificial | aa | GGMIWYFDV |
| 607. | PMH8H3-VH | artificial | nt | CAGGTGCAGCTGGTCCAGTCTGGGGCAGAGGTTGTGAAGCCAGGGGCC |
| | | | | TCAGTCAAGTTGTCCTGCAAAGCTTCTGGCTTCACCATTACAGACACC |
| | | | | TATATGGACTGGGTGAGGCAGGCGCCTGGACAGGGCCTGGAATGGATT |
| | | | | GGAAGGATTGATCCTGCGAATGGTGATAGTAAATATGACCCGAAATTC |
| | | | | CAGGGCAGGGCCACTATAACACCAGACACATCCACCAACACAGTCTAC |
| | | | | ATGGAGCTCAGCAGCCTGAGATCTGAGGACACTGCCGTCTATTATTGT |
| | | | | GCTAGAGGCGGGATGATATGGTACTTCGATGTCTGGGGCCAAGGGACC |
| | | | | ACGGTCACCGTCTCCTCA |
| 608. | PMH8H3-VL | artificial | aa | EIVLTQSPATLSLSPGERITLSCSASSSISSNYLHWYQQKPGLPPRLL |
| | | | | IYRTSNLASGIPDRFSGSGSGTDFTLTIGTLEPEDFAVYYCQQGSSLP |
| | | | | YTFGQGTKLEIK |
| 609. | PMH8H3-LCDR1 | artificial | aa | SASSSISSNYLH |
| 610. | PMH8H3-LCDR2 | artificial | aa | RTSNLAS |
| 611. | PMH8H3-LCDR3 | artificial | aa | QQGSSLPYT |
| 612. | PMH8H3-VL | artificial | nt | GAGATCGTGCTCACCCAGTCTCCAGCCACCCTGTCTCTATCTCCCGGG |
| | | | | GAGAGGATCACTCTCTCCTGCAGTGCCAGCTCAAGTATAAGTTCCAAT |
| | | | | TACTTGCATTGGTATCAGCAGAAGCCAGGATTACCCCCTAGACTCTTG |
| | | | | ATTTATAGGACATCCAATCTGGCTTCTGGAATCCCAGATCGCTTCAGT |
| | | | | GGCAGTGGGTCTGGGACCGATTTCACTCTCACAATTGGCACGCTGGAG |
| | | | | CCTGAAGATTTTGCCGTTTACTACTGCCAGCAGGGTAGTAGTTTACCG |
| | | | | TACACGTTCGGACAAGGGACCAAGCTTGAGATCAAA |
| 613. | PMH8H3-VH-VL | artificial | aa | QVQLVQSGAEVVKPGASVKLSCKASGFTITDTYMDWVRQAPGQGLEWI |
| | | | | GRIDPANGDSKYDPKFQGRATITPDTSTNTVYMELSSLRSEDTAVYYC |
| | | | | ARGGMIWYFDVWGQGTTVTVSSGGGGSGGGGSGGGGSEIVLTQSPATL |
| | | | | SLSPGERITLSCSASSSISSNYLHWYQQKPGLPPRLL IYRTSNLASGI |
| | | | | PDRFSGSGSGTDFTLTIGTLEPEDFAVYYCQQGSSLPYTFGQGTKLEI |
| | | | | K |
| 614. | PMH8H3-VH-VL | artificial | nt | CAGGTGCAGCTGGTCCAGTCTGGGGCAGAGGTTGTGAAGCCAGGGGCC |
| | | | | TCAGTCAAGTTGTCCTGCAAAGCTTCTGGCTTCACCATTACAGACACC |
| | | | | TATATGGACTGGGTGAGGCAGGCGCCTGGACAGGGCCTGGAATGGATT |
| | | | | GGAAGGATTGATCCTGCGAATGGTGATAGTAAATATGACCCGAAATTC |
| | | | | CAGGGCAGGGCCACTATAACACCAGACACATCCACCAACACAGTCTAC |
| | | | | ATGGAGCTCAGCAGCCTGAGATCTGAGGACACTGCCGTCTATTATTGT |
| | | | | GCTAGAGGCGGGATGATATGGTACTTCGATGTCTGGGGCCAAGGGACC |
| | | | | ACGGTCACCGTCTCCTCAGGTGGTGGTGGTTCTGGCGGCGGCGGCTCC |
| | | | | GGTGGTGGTGGTTCTGAGATCGTGCTCACCCAGTCTCCAGCCACCCTG |
| | | | | TCTCTATCTCCCGGGGAGAGGATCACTCTCTCCTGCAGTGCCAGCTCA |
| | | | | AGTATAAGTTCCAATTACTTGCATTGGTATCAGCAGAAGCCAGGATTA |
| | | | | CCCCCTAGACTCTTGATTTATAGGACATCCAATCTGGCTTCTGGAATC |
| | | | | CCAGATCGCTTCAGTGGCAGTGGGTCTGGGACCGATTTCACTCTCACA |
| | | | | ATTGGCACGCTGGAGCCTGAAGATTTTGCCGTTTACTACTGCCAGCAG |
| | | | | GGTAGTAGTTTACCGTACACGTTCGGACAAGGGACCAAGCTTGAGATC |
| | | | | AAA |
| 615. | PMH8H3 VH-VL × I2C | artificial | aa | QVQLVQSGAEVVKPGASVKLSCKASGFTITDTYMDWVRQAPGQGLEWI |
| | VH-VL | | | GRIDPANGDSKYDPKFQGRATITPDTSTNTVYMELSSLRSEDTAVYYC |
| | | | | ARGGMIWYFDVWGQGTTVTVSSGGGGSGGGGSGGGGSEIVLTQSPATL |
| | | | | SLSPGERITLSCSASSSISSNYLHWYQQKPGLPPRLLIYRTSNLASGI |
| | | | | PDRFSGSGSGTDFTLTIGTLEPEDFAVYYCQQGSSLPYTFGQGTKLEI |
| | | | | KSGGGGSEVQLVESGGGLVQPGGSLKLSCAASGFTFNKYAMNWVRQAP |
| | | | | GKGLEWVARIRSKYNNYATYYADSVKDRFTISRDDSKNTAYLQMNNLK |
| | | | | TEDTAVYYCVRHGNFGNSYISYWAYWGQGTLVTVSSGGGGSGGGGSGG |
| | | | | GGSQTVVTQEPSLTVSPGGTVTLTCGSSTGAVTSGNYPNWVQQKPGQA |
| | | | | PRGLIGGTKFLAPGTPARFSGSLLGGKAALTLSGVQPEDEAEYYCVLW |
| | | | | YSNRWVFGGGTKLTVL |
| 616. | PMH8H3 VH-VL × I2C | artificial | nt | CAGGTGCAGCTGGTCCAGTCTGGGGCAGAGGTTGTGAAGCCAGGGGCC |
| | VH-VL | | | TCAGTCAAGTTGTCCTGCAAAGCTTCTGGCTTCACCATTACAGACACC |
| | | | | TATATGGACTGGGTGAGGCAGGCGCCTGGACAGGGCCTGGAATGGATT |
| | | | | GGAAGGATTGATCCTGCGAATGGTGATAGTAAATATGACCCGAAATTC |
| | | | | CAGGGCAGGGCCACTATAACACCAGACACATCCACCAACACAGTCTAC |
| | | | | ATGGAGCTCAGCAGCCTGAGATCTGAGGACACTGCCGTCTATTATTGT |
| | | | | GCTAGAGGCGGGATGATATGGTACTTCGATGTCTGGGGCCAAGGGACC |
| | | | | ACGGTCACCGTCTCCTCAGGTGGTGGTGGTTCTGGCGGCGGCGGCTCC |
| | | | | GGTGGTGGTGGTTCTGAGATCGTGCTCACCCAGTCTCCAGCCACCCTG |
| | | | | TCTCTATCTCCCGGGGAGAGGATCACTCTCTCCTGCAGTGCCAGCTCA |
| | | | | AGTATAAGTTCCAATTACTTGCATTGGTATCAGCAGAAGCCAGGATTA |
| | | | | CCCCCTAGACTCTTGATTTATAGGACATCCAATCTGGCTTCTGGAATC |
| | | | | CCAGATCGCTTCAGTGGCAGTGGGTCTGGGACCGATTTCACTCTCACA |
| | | | | ATTGGCACGCTGGAGCCTGAAGATTTTGCCGTTTACTACTGCCAGCAG |
| | | | | GGTAGTAGTTTACCGTACACGTTCGGACAAGGGACCAAGCTTGAGATC |
| | | | | AAATCCGGAGGTGGTGGATCCGAGGTGCAGCTGGTCGAGTCTGGAGGA |
| | | | | GGATTGGTGCAGCCTGGAGGGTCATTGAAACTCTCATGTGCAGCCTCT |
| | | | | GGATTCACCTTCAATAAGTACGCCATGAACTGGGTCCGCCAGGCTCCA |
| | | | | GGAAAGGGTTTGGAATGGGTTGCTCGCATAAGAAGTAAATATAATAAT |
| | | | | TATGCAACATATTATGCCGATTCAGTGAAAGACAGGTTCACCATCTCC |
| | | | | AGAGATGATTCAAAAAACACTGCCTATCTACAAATGAACAACTTGAAA |
| | | | | ACTGAGGACACTGCCGTGTACTACTGTGTGAGACATGGGAACTTCGGT |
| | | | | AATAGCTACATATCCTACTGGGCTTACTGGGGCCAAGGGACTCTGGTC |
| | | | | ACCGTCTCCTCAGGTGGTGGTGGTTCTGGCGGCGGCGGCTCCGGTGGT |
| | | | | GGTGGTTCTCAGACTGTTGTGACTCAGGAACCTTCACTCACCGTATCA |
| | | | | CCTGGTGGAACAGTCACACTCACTTGTGGCTCCTCGACTGGGGCTGTT |
| | | | | ACATCTGGCAACTACCCAAACTGGGTCCAACAAAAACCAGGTCAGGCA |
| | | | | CCCCGTGGTCTAATAGGTGGGACTAAGTTCCTCGCCCCCGGTACTCCT |
| | | | | GCCAGATTCTCAGGCTCCCTGCTTGGAGGCAAGGCTGCCCTCACCCTC |
| | | | | TCAGGGGTACAGCCAGAGGATGAGGCAGAATATTACTGTGTTCTATGG |
| | | | | TACAGCAACCGCTGGGTGTTCGGTGGAGGAACCAAACTGACTGTCCTA |
| 617. | PM74G3-VH | artificial | aa | QVQLVQSGAEVKKPGASVKLSCKASGYTFTYFDINWVRQAPEQGLEWM |
| | | | | GGISPGDGNTNYNENFKGRVTMTIDTSSSTAYIELSRLTSDDTAVYYC |
| | | | | ARDGNFPYYAMDSWGQGTTVTVSS |
| 618. | PM74G3-HCDR1 | artificial | aa | YFDIN |
| 619. | PM74G3-HCDR2 | artificial | aa | GISPGDGNTNYNENFKG |
| 620. | PM74G3-HCDR3 | artificial | aa | DGNFPYYAMDS |
| 621. | PM74G3-VH | artificial | nt | CAGGTGCAGCTGGTCCAGTCTGGCGCCGAAGTGAAGAAGCCTGGCGCC |
| | | | | TCCGTGAAGCTGTCCTGCAAGGCCTCCGGCTACACCTTCACCTACTTC |
| | | | | GACATCAACTGGGTGCGGCAGGCGCCTGAGCAGGGCCTGGAATGGATG |
| | | | | GGCGGCATCTCCCCTGGCGACGGCAACACCAACTACAACGAGAACTTC |
| | | | | AAGGGCAGGGTCACAATGACCATAGACACGTCCAGCTCCACCGCCTAC |
| | | | | ATCGAGCTGTCCCGGCTGACATCTGACGACACCGCCGTGTACTACTGC |
| | | | | GCCAGGGACGGCAACTTCCCTTACTACGCCATGGACTCTTGGGGCCAG |
| | | | | GGCACCACGGTGACCGTCTCCTCA |
| 622. | PM74G3-VL | artificial | aa | DVVMTQTPLSLPVSLGDQASISCRSSQSLVHSNGNTYLHWYLQKPGQS |
| | | | | PKLLIYKVSNRFSGVPDRFSGSGSGTDFTLKISRVEAEDLGVYFCSQS |
| | | | | THVPYTFGGGTKLEIK |
| 623. | PM74G3-LCDR1 | artificial | aa | RSSQSLVHSNGNTYLH |
| 624. | PM74G3-LCDR2 | artificial | aa | KVSNRFS |
| 625. | PM74G3-LCDR3 | artificial | aa | SQSTHVPYT |
| 626. | PM74G3-VL | artificial | nt | GACGTCGTGATGACCCAGACTCCACTCTCCCTGCCTGTCAGTCTTGGA |
| | | | | GATCAAGCCTCCATCTCTTGCAGATCTAGTCAGAGCCTTGTACACAGT |
| | | | | AATGGAAACACCTATTTACATTGGTACCTGCAGAAGCCAGGCCAGTCT |
| | | | | CCAAAGCTCCTGATCTACAAAGTTTCCAACCGATTTTCTGGGGTCCCA |
| | | | | GACAGGTTCAGTGGCAGTGGATCAGGGACAGATTTCACACTCAAGATC |
| | | | | AGCAGAGTGGAGGCTGAGGATCTGGGAGTTTATTTCTGCTCTCAAAGT |
| | | | | ACACATGTTCCGTACACGTTCGGAGGGGGGACCAAGCTTGAGATCAAA |
| 627. | PM74G3-VH-VL | artificial | aa | QVQLVQSGAEVKKPGASVKLSCKASGYTFTYFDINWVRQAPEQGLEWM |
| | | | | GGISPGDGNTNYNENFKGRVTMTIDTSSSTAYIELSRLTSDDTAVYYC |
| | | | | ARDGNFPYYAMDSWGQGTTVTVSSGGGGSGGGGSGGGGSDVVMTQTPL |
| | | | | SLPVSLGDQASISCRSSQSLVHSNGNTYLHWYLQKPGQSPKLLIYKVS |
| | | | | NRFSGVPDRFSGSGSGTDFTLKISRVEAEDLGVYFCSQSTHVPYTFGG |
| | | | | GTKLEIK |
| 628. | PM74G3-VH-VL | artificial | nt | CAGGTGCAGCTGGTCCAGTCTGGCGCCGAAGTGAAGAAGCCTGGCGCC |
| | | | | TCCGTGAAGCTGTCCTGCAAGGCCTCCGGCTACACCTTCACCTACTTC |
| | | | | GACATCAACTGGGTGCGGCAGGCGCCTGAGCAGGGCCTGGAATGGATG |
| | | | | GGCGGCATCTCCCCTGGCGACGGCAACACCAACTACAACGAGAACTTC |
| | | | | AAGGGCAGGGTCACAATGACCATAGACACGTCCAGCTCCACCGCCTAC |
| | | | | ATCGAGCTGTCCCGGCTGACATCTGACGACACCGCCGTGTACTACTGC |
| | | | | GCCAGGGACGGCAACTTCCCTTACTACGCCATGGACTCTTGGGGCCAG |
| | | | | GGCACCACGGTGACCGTCTCCTCAGGTGGTGGTGGTTCTGGCGGCGGC |
| | | | | GGCTCCGGTGGTGGTGGTTCTGACGTCGTGATGACCCAGACTCCACTC |
| | | | | TCCCTGCCTGTCAGTCTTGGAGATCAAGCCTCCATCTCTTGCAGATCT |
| | | | | AGTCAGAGCCTTGTACACAGTAATGGAAACACCTATTTACATTGGTAC |
| | | | | CTGCAGAAGCCAGGCCAGTCTCCAAAGCTCCTGATCTACAAAGTTTCC |
| | | | | AACCGATTTTCTGGGGTCCCAGACAGGTTCAGTGGCAGTGGATCAGGG |
| | | | | ACAGATTTCACACTCAAGATCAGCAGAGTGGAGGCTGAGGATCTGGGA |
| | | | | GTTTATTTCTGCTCTCAAAGTACACATGTTCCGTACACGTTCGGAGGG |
| | | | | GGGACCAAGCTTGAGATCAAA |
| 629. | PM74G3 VH-VL × I2C | artificial | aa | QVQLVQSGAEVKKPGASVKLSCKASGYTFTYFDINWVRQAPEQGLEWM |
| | VH-VL | | | GGISPGDGNTNYNENFKGRVTMTIDTSSSTAYIELSRLTSDDTAVYYC |
| | | | | ARDGNFPYYAMDSWGQGTTVTVSSGGGGSGGGGSGGGGSDVVMTQTPL |
| | | | | SLPVSLGDQASISCRSSQSLVHSNGNTYLHWYLQKPGQSPKLLIYKVS |
| | | | | NRFSGVPDRFSGSGSGTDFTLKISRVEAEDLGVYFCSQSTHVPYTFGG |
| | | | | GTKLEIKSGGGGSEVQLVESGGGLVQPGGSLKLSCAASGFTFNKYAMN |
| | | | | WVRQAPGKGLEWVARIRSKYNNYATYYADSVKDRFTISRDDSKNTAYL |
| | | | | QMNNLKTEDTAVYYCVRHGNFGNSYISYWAYWGQGTLVTVSSGGGGSG |
| | | | | GGGSGGGGSQTVVTQEPSLTVSPGGTVTLTCGSSTGAVTSGNYPNWVQ |
| | | | | QKPGQAPRGLIGGTKFLAPGTPARFSGSLLGGKAALTLSGVQPEDEAE |
| | | | | YYCVLWYSNRWVFGGGTKLTVL |
| 630. | PM74G3 VH-VL × I2C | artificial | nt | CAGGTGCAGCTGGTCCAGTCTGGCGCCGAAGTGAAGAAGCCTGGCGCC |
| | VH-VL | | | TCCGTGAAGCTGTCCTGCAAGGCCTCCGGCTACACCTTCACCTACTTC |
| | | | | GACATCAACTGGGTGCGGCAGGCGCCTGAGCAGGGCCTGGAATGGATG |
| | | | | GGCGGCATCTCCCCTGGCGACGGCAACACCAACTACAACGAGAACTTC |
| | | | | AAGGGCAGGGTCACAATGACCATAGACACGTCCAGCTCCACCGCCTAC |
| | | | | ATCGAGCTGTCCCGGCTGACATCTGACGACACCGCCGTGTACTACTGC |
| | | | | GCCAGGGACGGCAACTTCCCTTACTACGCCATGGACTCTTGGGGCCAG |
| | | | | GGCACCACGGTGACCGTCTCCTCAGGTGGTGGTGGTTCTGGCGGCGGC |
| | | | | GGCTCCGGTGGTGGTGGTTCTGACGTCGTGATGACCCAGACTCCACTC |
| | | | | TCCCTGCCTGTCAGTCTTGGAGATCAAGCCTCCATCTCTTGCAGATCT |
| | | | | AGTCAGAGCCTTGTACACAGTAATGGAAACACCTATTTACATTGGTAC |
| | | | | CTGCAGAAGCCAGGCCAGTCTCCAAAGCTCCTGATCTACAAAGTTTCC |
| | | | | AACCGATTTTCTGGGGTCCCAGACAGGTTCAGTGGCAGTGGATCAGGG |
| | | | | ACAGATTTCACACTCAAGATCAGCAGAGTGGAGGCTGAGGATCTGGGA |
| | | | | GTTTATTTCTGCTCTCAAAGTACACATGTTCCGTACACGTTCGGAGGG |
| | | | | GGGACCAAGCTTGAGATCAAATCCGGAGGTGGTGGATCCGAGGTGCAG |
| | | | | CTGGTCGAGTCTGGAGGAGGATTGGTGCAGCCTGGAGGGTCATTGAAA |
| | | | | CTCTCATGTGCAGCCTCTGGATTCACCTTCAATAAGTACGCCATGAAC |
| | | | | TGGGTCCGCCAGGCTCCAGGAAAGGGTTTGGAATGGGTTGCTCGCATA |
| | | | | AGAAGTAAATATAATAATTATGCAACATATTATGCCGATTCAGTGAAA |
| | | | | GACAGGTTCACCATCTCCAGAGATGATTCAAAAAACACTGCCTATCTA |
| | | | | CAAATGAACAACTTGAAAACTGAGGACACTGCCGTGTACTACTGTGTG |
| | | | | AGACATGGGAACTTCGGTAATAGCTACATATCCTACTGGGCTTACTGG |
| | | | | GGCCAAGGGACTCTGGTCACCGTCTCCTCAGGTGGTGGTGGTTCTGGC |
| | | | | GGCGGCGGCTCCGGTGGTGGTGGTTCTCAGACTGTTGTGACTCAGGAA |
| | | | | CCTTCACTCACCGTATCACCTGGTGGAACAGTCACACTCACTTGTGGC |
| | | | | TCCTCGACTGGGGCTGTTACATCTGGCAACTACCCAAACTGGGTCCAA |
| | | | | CAAAAACCAGGTCAGGCACCCCGTGGTCTAATAGGTGGGACTAAGTTC |
| | | | | CTCGCCCCCGGTACTCCTGCCAGATTCTCAGGCTCCCTGCTTGGAGGC |
| | | | | AAGGCTGCCCTCACCCTCTCAGGGGTACAGCCAGAGGATGAGGCAGAA |
| | | | | TATTACTGTGTTCTATGGTACAGCAACCGCTGGGTGTTCGGTGGAGGA |
| | | | | ACCAAACTGACTGTCCTA |
| 631. | Macaca fascicularis | Macaca | aa | QDGNEEMGSITQTPYQVSISGTTILTC |
| | CD3ε□ 1-27 | fascicularis | | |
| 632. | Macaca fascicularis | Macaca | aa | QDGNEEMGSITQTPYQVSISGTTVILT |
| | CD3ε□ 1-27 | fascicularis | | |
| 633. | Macaca mulatta | Macaca | aa | QDGNEEMGSITQTPYHVSISGTTVILT |
| | CD3ε□ 1-27 | mulatta | | |

The application's sequence listing, which the Patent Office published only in electronic form, follows.

SEQUENCE LISTING (633 sequences)

SEQ ID NO: 1 - protein, 105 aa, Homo sapiens
QDGNEEMGGITQTPYKVSISGTTVILTCPQYPGSEILWQHNDKNIGGDEDDKNIGSDEDHLSLKEFSELEQSGYYVCYPRGSKPEDANFYLYLRARVCENCMEMD

SEQ ID NO: 2 - protein, 27 aa, Homo sapiens
QDGNEEMGGITQTPYKVSISGTTVILT

SEQ ID NO: 3 - protein, 96 aa, Callithrix jacchus
QDGNEEMGDTTQNPYKVSISGTTVTLTCPRYDGHEIKWLVNSQNKEGHEDHLLLEDFSEMEQSGYYACLSKETPAEEASHYLYLKARVCENCVEVD

SEQ ID NO: 4 - protein, 27 aa, Callithrix jacchus
QDGNEEMGDTTQNPYKVSISGTTVTLT

SEQ ID NO: 5 - protein, 96 aa, Saguinus oedipus; identical to SEQ ID NO: 3

SEQ ID NO: 6 - protein, 27 aa, Saguinus oedipus
QDGNEEMGDTTQNPYKVSISGTTVTLT

SEQ ID NO: 7 - protein, 96 aa, Saimiri sciureus
QDGNEEIGDTTQNPYKVSISGTTVTLTCPRYDGQEIKWLVNDQNKEGHEDHLLLEDFSEMEQSGYYACLSKETPTEEASHYLYLKARVCENCVEVD

SEQ ID NO: 8 - protein, 27 aa, Saimiri sciureus
QDGNEEIGDTTQNPYKVSISGTTVTLT

SEQ ID NO: 9 - protein, 14 aa, artificial
  CDR-L1 of F6A
GSSTGAVTSGYYPN

SEQ ID NO: 10 - protein, 7 aa, artificial
  CDR-L2 of F6A
GTKFLAP

SEQ ID NO: 11 - protein, 9 aa, artificial
  CDR-L3 of F6A
ALWYSNRWV

SEQ ID NO: 12 - protein, 5 aa, artificial
  CDR-H1 of F6A
IYAMN

SEQ ID NO: 13 - protein, 19 aa, artificial
  CDR-H2 of F6A
RIRSKYNNYATYYADSVKS

SEQ ID NO: 14 - protein, 14 aa, artificial
  CDR-H3 of F6A
HGNFGNSYVSFFAY

SEQ ID NO: 15 - protein, 125 aa, artificial
  VH of 6FA
EVQLVESGGGLVQPGGSLKLSCAASGFTFNIYAMNWVRQAPGKGLEWVARIRSKYNNYATYYADSVKSRFTISRDDSKNTAYLQMNNLKTEDTAVYYCVRHGNFGNSYVSFFAYWGQGTLVTVSS

SEQ ID NO: 16 - DNA, 375 bp, artificial
  VH of 6FA
gaggtgcagctggtcgagtctggaggaggattggtgcagcctggagggtcattgaaactctcatgtgcagcctctggattcaccttcaatatctacgccatgaactgggtccgccaggctccaggaaagggtttggaatgggttgctcgcataagaagtaaatataataattatgcaacatattatgccgattcagtgaaaagcaggttcaccatctccagagatgattcaaaaaacactgcctatctacaaatgaacaacttgaaaactgaggacactgccgtgtactactgtgtgagacatgggaacttcggtaatagctacgtatccttcttcgcttactggggccaagggactctggtcaccgtctcctca

SEQ ID NO: 17 - protein, 109 aa, artificial
  VL of 6FA
QTVVTQEPSLTVSPGGTVTLTCGSSTGAVTSGYYPNWVQQKPGQAPRGLIGGTKFLAPGTPARFSGSLLGGKAALTLSGVQPEDEAEYYCALWYSNRWVFGGGTKLTVL

SEQ ID NO: 18 - DNA, 327 bp, artificial
  VL of 6FA
cagactgttgtgactcaggaaccttcactcaccgtatcacctggtggaacagtcacactcacttgtggctcctcgactggggctgttacatctggctactacccaaactgggtccaacaaaaaccaggtcaggcaccccgtggtctaataggtgggactaagttcctcgcccccggtactcctgccagattctcaggctccctgcttggaggcaaggctgccctcaccctctcaggggtacagccagaggatgaggcagaatattactgtgctctatggtacagcaaccgctgggtgttcggtggaggaaccaaactgactgtccta

SEQ ID NO: 19 - protein, 125 aa, artificial
  VH-P of 6FA
EVQLLESGGGLVQPGGSLKLSCAASGFTFNIYAMNWVRQAPGKGLEWVARIRSKYNNYATYYADSVKSRFTISRDDSKNTAYLQMNNLKTEDTAVYYCVRHGNFGNSYVSFFAYWGQGTLVTVSS

SEQ ID NO: 20 - DNA, 375 bp, artificial
  VH-P of 6FA
gaggtgcagctgctcgagtctggaggaggattggtgcagcctggagggtcattgaaactctcatgtgcagcctctggattcaccttcaatatctacgccatgaactgggtccgccaggctccaggaaagggtttggaatgggttgctcgcataagaagtaaatataataattatgcaacatattatgccgattcagtgaaaagcaggttcaccatctccagagatgattcaaaaaacactgcctatctacaaatgaacaacttgaaaactgaggacactgccgtgtactactgtgtgagacatgggaacttcggtaatagctacgtatccttcttcgcttactggggccaagggactctggtcaccgtctcctca

SEQ ID NO: 21 - protein, 109 aa, artificial
  VL-P of 6FA
ELVVTQEPSLTVSPGGTVTLTCGSSTGAVTSGYYPNWVQQKPGQAPRGLIGGTKFLAPGTPARFSGSLLGGKAALTLSGVQPEDEAEYYCALWYSNRWVFGGGTKLTVL

SEQ ID NO: 22 - DNA, 327 bp, artificial
  VL-P of 6FA
gagctcgttgtgactcaggaaccttcactcaccgtatcacctggtggaacagtcacactcacttgtggctcctcgactggggctgttacatctggctactacccaaactgggtccaacaaaaaccaggtcaggcaccccgtggtctaataggtgggactaagttcctcgcccccggtactcctgccagattctcaggctccctgcttggaggcaaggctgccctcaccctctcaggggtacagccagaggatgaggcagaatattactgtgctctatggtacagcaaccgctgggtgttcggtggaggaaccaaactgactgtccta

SEQ ID NO: 23 - protein, 249 aa, artificial
  VH-VL of 6FA
EVQLVESGGGLVQPGGSLKLSCAASGFTFNIYAMNWVRQAPGKGLEWVARIRSKYNNYATYYADSVKSRFTISRDDSKNTAYLQMNNLKTEDTAVYYCVRHGNFGNSYVSFFAYWGQGTLVTVSSGGGGSGGGGSGGGGSQTVVTQEPSLTVSPGGTVTLTCGSSTGAVTSGYYPNWVQQKPGQAPRGLIGGTKFLAPGTPARFSGSLLGGKAALTLSGVQPEDEAEYYCALWYSNRWVFGGGTKLTVL

SEQ ID NO: 24 - DNA, 747 bp, artificial
  VH-VL of 6FA
gaggtgcagctggtcgagtctggaggaggattggtgcagcctggagggtcattgaaactctcatgtgcagcctctggattcaccttcaatatctacgccatgaactgggtccgccaggctccaggaaagggtttggaatgggttgctcgcataagaagtaaatataataattatgcaacatattatgccgattcagtgaaaagcaggttcaccatctccagagatgattcaaaaaacactgcctatctacaaatgaacaacttgaaaactgaggacactgccgtgtactactgtgtgagacatgggaacttcggtaatagctacgtatccttcttcgcttactggggccaagggactctggtcaccgtctcctcaggtggtggtggttctggcggcggcggctccggtggtggtggttctcagactgttgtgactcaggaaccttcactcaccgtatcacctggtggaacagtcacactcacttgtggctcctcgactggggctgttacatctggctactacccaaactgggtccaacaaaaaccaggtcaggcaccccgtggtctaataggtgggactaagttcctcgcccccggtactcctgccagattctcaggctccctgcttggaggcaaggctgccctcaccctctcaggggtacagccagaggatgaggcagaatattactgtgctctatggtacagcaaccgctgggtgttcggtggaggaaccaaactgactgtccta

SEQ ID NO: 25 - protein, 249 aa, artificial
  VH-VL-P of 6FA
EVQLLESGGGLVQPGGSLKLSCAASGFTFNIYAMNWVRQAPGKGLEWVARIRSKYNNYATYYADSVKSRFTISRDDSKNTAYLQMNNLKTEDTAVYYCVRHGNFGNSYVSFFAYWGQGTLVTVSSGGGGSGGGGSGGGGSELVVTQEPSLTVSPGGTVTLTCGSSTGAVTSGYYPNWVQQKPGQAPRGLIGGTKFLAPGTPARFSGSLLGGKAALTLSGVQPEDEAEYYCALWYSNRWVFGGGTKLTVL

SEQ ID NO: 26 - DNA, 747 bp, artificial
  VH-VL-P of 6FA
gaggtgcagctgctcgagtctggaggaggattggtgcagcctggagggtcattgaaactctcatgtgcagcctctggattcaccttcaatatctacgccatgaactgggtccgccaggctccaggaaagggtttggaatgggttgctcgcataagaagtaaatataataattatgcaacatattatgccgattcagtgaaaagcaggttcaccatctccagagatgattcaaaaaacactgcctatctacaaatgaacaacttgaaaactgaggacactgccgtgtactactgtgtgagacatgggaacttcggtaatagctacgtatccttcttcgcttactggggccaagggactctggtcaccgtctcctcaggtggtggtggttctggcggcggcggctccggtggtggtggttctgagctcgttgtgactcaggaaccttcactcaccgtatcacctggtggaacagtcacactcacttgtggctcctcgactggggctgttacatctggctactacccaaactgggtccaacaaaaaccaggtcaggcaccccgtggtctaataggtgggactaagttcctcgcccccggtactcctgccagattctcaggctccctgcttggaggcaaggctgccctcaccctctcaggggtacagccagaggatgaggcagaatattactgtgctctatggtacagcaaccgctgggtgttcggtggaggaaccaaactgactgtccta

SEQ ID NO: 27 - protein, 14 aa, artificial
  CDR-L1 of H2C
GSSTGAVTSGYYPN

SEQ ID NO: 28 - protein, 7 aa, artificial
  CDR-L2 of H2C
GTKFLAP

SEQ ID NO: 29 - protein, 9 aa, artificial
  CDR-L3 of H2C
ALWYSNRWV

SEQ ID NO: 30 - protein, 5 aa, artificial
  CDR-H1 of H2C
KYAMN

SEQ ID NO: 31 - protein, 19 aa, artificial
  CDR-H2 of H2C
RIRSKYNNYATYYADSVKD

SEQ ID NO: 32 - protein, 14 aa, artificial
  CDR-H3 of H2C
HGNFGNSYISYWAY

SEQ ID NO: 33 - protein, 125 aa, artificial
  VH of H2C
EVQLVESGGGLVQPGGSLKLSCAASGFTFNKYAMNWVRQAPGKGLEWVARIRSKYNNYATYYADSVKDRFTISRDDSKNTAYLQMNNLKTEDTAVYYCVRHGNFGNSYISYWAYWGQGTLVTVSS

SEQ ID NO: 34 - DNA, 375 bp, artificial
  VH of H2C
gaggtgcagctggtcgagtctggaggaggattggtgcagcctggagggtcattgaaactctcatgtgcagcctctggattcaccttcaataagtacgccatgaactgggtccgccaggctccaggaaagggtttggaatgggttgctcgcataagaagtaaatataataattatgcaacatattatgccgattcagtgaaagacaggttcaccatctccagagatgattcaaaaaacactgcctatctacaaatgaacaacttgaaaactgaggacactgccgtgtactactgtgtgagacatgggaacttcggtaatagctacatatcctactgggcttactggggccaagggactctggtcaccgtctcctca

SEQ ID NO: 35 - protein, 109 aa, artificial; identical to SEQ ID NO: 17
  VL of H2C

SEQ ID NO: 36 - DNA, 327 bp, artificial; identical to SEQ ID NO: 18
  VL of H2C

SEQ ID NO: 37 - protein, 125 aa, artificial
  VH-P of H2C
EVQLLESGGGLVQPGGSLKLSCAASGFTFNKYAMNWVRQAPGKGLEWVARIRSKYNNYATYYADSVKDRFTISRDDSKNTAYLQMNNLKTEDTAVYYCVRHGNFGNSYISYWAYWGQGTLVTVSS

SEQ ID NO: 38 - DNA, 375 bp, artificial
  VH-P of H2C
gaggtgcagctgctcgagtctggaggaggattggtgcagcctggagggtcattgaaactctcatgtgcagcctctggattcaccttcaataagtacgccatgaactgggtccgccaggctccaggaaagggtttggaatgggttgctcgcataagaagtaaatataataattatgcaacatattatgccgattcagtgaaagacaggttcaccatctccagagatgattcaaaaaacactgcctatctacaaatgaacaacttgaaaactgaggacactgccgtgtactactgtgtgagacatgggaacttcggtaatagctacatatcctactgggcttactggggccaagggactctggtcaccgtctcctca

SEQ ID NO: 39 - protein, 109 aa, artificial; identical to SEQ ID NO: 21
  VL-P of H2C

SEQ ID NO: 40 - DNA, 327 bp, artificial; identical to SEQ ID NO: 22
  VL-P of H2C

SEQ ID NO: 41 - protein, 249 aa, artificial
  VH-VL of H2C
EVQLVESGGGLVQPGGSLKLSCAASGFTFNKYAMNWVRQAPGKGLEWVARIRSKYNNYATYYADSVKDRFTISRDDSKNTAYLQMNNLKTEDTAVYYCVRHGNFGNSYISYWAYWGQGTLVTVSSGGGGSGGGGSGGGGSQTVVTQEPSLTVSPGGTVTLTCGSSTGAVTSGYYPNWVQQKPGQAPRGLIGGTKFLAPGTPARFSGSLLGGKAALTLSGVQPEDEAEYYCALWYSNRWVFGGGTKLTVL

SEQ ID NO: 42 - DNA, 747 bp, artificial
  VH-VL of H2C
gaggtgcagctggtcgagtctggaggaggattggtgcagcctggagggtcattgaaactctcatgtgcagcctctggattcaccttcaataagtacgccatgaactgggtccgccaggctccaggaaagggtttggaatgggttgctcgcataagaagtaaatataataattatgcaacatattatgccgattcagtgaaagacaggttcaccatctccagagatgattcaaaaaacactgcctatctacaaatgaacaacttgaaaactgaggacactgccgtgtactactgtgtgagacatgggaacttcggtaatagctacatatcctactgggcttactggggccaagggactctggtcaccgtctcctcaggtggtggtggttctggcggcggcggctccggtggtggtggttctcagactgttgtgactcaggaaccttcactcaccgtatcacctggtggaacagtcacactcacttgtggctcctcgactggggctgttacatctggctactacccaaactgggtccaacaaaaaccaggtcaggcaccccgtggtctaataggtgggactaagttcctcgcccccggtactcctgccagattctcaggctccctgcttggaggcaaggctgccctcaccctctcaggggtacagccagaggatgaggcagaatattactgtgctctatggtacagcaaccgctgggtgttcggtggaggaaccaaactgactgtccta

SEQ ID NO: 43 - protein, 249 aa, artificial
  VH-VL-P of H2C
EVQLLESGGGLVQPGGSLKLSCAASGFTFNKYAMNWVRQAPGKGLEWVARIRSKYNNYATYYADSVKDRFTISRDDSKNTAYLQMNNLKTEDTAVYYCVRHGNFGNSYISYWAYWGQGTLVTVSSGGGGSGGGGSGGGGSELVVTQEPSLTVSPGGTVTLTCGSSTGAVTSGYYPNWVQQKPGQAPRGLIGGTKFLAPGTPARFSGSLLGGKAALTLSGVQPEDEAEYYCALWYSNRWVFGGGTKLTVL

SEQ ID NO: 44 - DNA, 747 bp, artificial
  VH-VL-P of H2C
gaggtgcagctgctcgagtctggaggaggattggtgcagcctggagggtcattgaaactctcatgtgcagcctctggattcaccttcaataagtacgccatgaactgggtccgccaggctccaggaaagggtttggaatgggttgctcgcataagaagtaaatataataattatgcaacatattatgccgattcagtgaaagacaggttcaccatctccagagatgattcaaaaaacactgcctatctacaaatgaacaacttgaaaactgaggacactgccgtgtactactgtgtgagacatgggaacttcggtaatagctacatatcctactgggcttactggggccaagggactctggtcaccgtctcctcaggtggtggtggttctggcggcggcggctccggtggtggtggttctgagctcgttgtgactcaggaaccttcactcaccgtatcacctggtggaacagtcacactcacttgtggctcctcgactggggctgttacatctggctactacccaaactgggtccaacaaaaaccaggtcaggcaccccgtggtctaataggtgggactaagttcctcgcccccggtactcctgccagattctcaggctccctgcttggaggcaaggctgccctcaccctctcaggggtacagccagaggatgaggcagaatattactgtgctctatggtacagcaaccgctgggtgttcggtggaggaaccaaactgactgtccta

SEQ ID NO: 45 - protein, 14 aa, artificial
  CDR-L1 of H1E
GSSTGAVTSGYYPN

SEQ ID NO: 46 - protein, 7 aa, artificial
  CDR-L2 of H1E
GTKFLAP

SEQ ID NO: 47 - protein, 9 aa, artificial
  CDR-L3 of H1E
ALWYSNRWV

SEQ ID NO: 48 - protein, 5 aa, artificial
  CDR-H1 of H1E
SYAMN

SEQ ID NO: 49 - protein, 19 aa, artificial
  CDR-H2 of H1E
RIRSKYNNYATYYADSVKG

SEQ ID NO: 50 - protein, 14 aa, artificial
  CDR-H3 of H1E
HGNFGNSYLSFWAY

SEQ ID NO: 51 - protein, 125 aa, artificial
  VH of H1E
EVQLVESGGGLEQPGGSLKLSCAASGFTFNSYAMNWVRQAPGKGLEWVARIRSKYNNYATYYADSVKGRFTISRDDSKNTAYLQMNNLKTEDTAVYYCVRHGNFGNSYLSFWAYWGQGTLVTVSS

SEQ ID NO: 52 - DNA, 374 bp, artificial
  VH of H1E
gaggtgcagctggtcgagtctggaggaggattggagcagcctggagggtcattgaaactctcatgtgcagcctctggattcaccttcaattcgtacgccatgaactgggtccgccaggctccaggaaagggtttggaatgggttgctcgcataagaagtaaatataataattatgcaacatattatgccgattcagtgaaagggaggttcaccatctccagagatgattcaaaaaacactgcctatctacaaatgaacaacttgaaaactgaggacactgccgtgtactactgtgtgagacatgggaacttcggtaatagctacctatccttctgggcttactggggccaagggactctggtcaccgtctcctc

SEQ ID NO: 53 - protein, 109 aa, artificial; identical to SEQ ID NO: 17
  VL of H1E

SEQ ID NO: 54 - DNA, 327 bp, artificial; identical to SEQ ID NO: 18
  VL of H1E

SEQ ID NO: 55 - protein, 125 aa, artificial
  VH-P of H1E
EVQLLESGGGLEQPGGSLKLSCAASGFTFNSYAMNWVRQAPGKGLEWVARIRSKYNNYATYYADSVKGRFTISRDDSKNTAYLQMNNLKTEDTAVYYCVRHGNFGNSYLSFWAYWGQGTLVTVSS

SEQ ID NO: 56 - DNA, 375 bp, artificial
  VH-P of H1E
gaggtgcagctgctcgagtctggaggaggattggagcagcctggagggtcattgaaactctcatgtgcagcctctggattcaccttcaattcgtacgccatgaactgggtccgccaggctccaggaaagggtttggaatgggttgctcgcataagaagtaaatataataattatgcaacatattatgccgattcagtgaaagggaggttcaccatctccagagatgattcaaaaaacactgcctatctacaaatgaacaacttgaaaactgaggacactgccgtgtactactgtgtgagacatgggaacttcggtaatagctacctatccttctgggcttactggggccaagggactctggtcaccgtctcctca

SEQ ID NO: 57 - protein, 109 aa, artificial; identical to SEQ ID NO: 21
  VL-P of H1E

SEQ ID NO: 58 - DNA, 327 bp, artificial; identical to SEQ ID NO: 22
  VL-P of H1E

SEQ ID NO: 59 - protein, 249 aa, artificial
  VH-VL of H1E
EVQLVESGGGLEQPGGSLKLSCAASGFTFNSYAMNWVRQAPGKGLEWVARIRSKYNNYATYYADSVKGRFTISRDDSKNTAYLQMNNLKTEDTAVYYCVRHGNFGNSYLSFWAYWGQGTLVTVSSGGGGSGGGGSGGGGSQTVVTQEPSLTVSPGGTVTLTCGSSTGAVTSGYYPNWVQQKPGQAPRGLIGGTKFLAPGTPARFSGSLLGGKAALTLSGVQPEDEAEYYCALWYSNRWVFGGGTKLTVL

SEQ ID NO: 60 - DNA, 747 bp, artificial
  VH-VL of H1E
gaggtgcagctggtcgagtctggaggaggattggagcagcctggagggtcattgaaactctcatgtgcagcctctggattcaccttcaattcgtacgccatgaactgggtccgccaggctccaggaaagggtttggaatgggttgctcgcataagaagtaaatataataattatgcaacatattatgccgattcagtgaaagggaggttcaccatctccagagatgattcaaaaaacactgcctatctacaaatgaacaacttgaaaactgaggacactgccgtgtactactgtgtgagacatgggaacttcggtaatagctacctatccttctgggcttactggggccaagggactctggtcaccgtctcctcaggtggtggtggttctggcggcggcggctccggtggtggtggttctcagactgttgtgactcaggaaccttcactcaccgtatcacctggtggaacagtcacactcacttgtggctcctcgactggggctgttacatctggctactacccaaactgggtccaacaaaaaccaggtcaggcaccccgtggtctaataggtgggactaagttcctcgcccccggtactcctgccagattctcaggctccctgcttggaggcaaggctgccctcaccctctcaggggtacagccagaggatgaggcagaatattactgtgctctatggtacagcaaccgctgggtgttcggtggaggaaccaaactgactgtccta

SEQ ID NO: 61 - protein, 249 aa, artificial
  VH-VL-P of H1E
EVQLLESGGGLEQPGGSLKLSCAASGFTFNSYAMNWVRQAPGKGLEWVARIRSKYNNYATYYADSVKGRFTISRDDSKNTAYLQMNNLKTEDTAVYYCVRHGNFGNSYLSFWAYWGQGTLVTVSSGGGGSGGGGSGGGGSELVVTQEPSLTVSPGGTVTLTCGSSTGAVTSGYYPNWVQQKPGQAPRGLIGGTKFLAPGTPARFSGSLLGGKAALTLSGVQPEDEAEYYCALWYSNRWVFGGGTKLTVL

SEQ ID NO: 62 - DNA, 747 bp, artificial
  VH-VL-P of H1E
gaggtgcagctgctcgagtctggaggaggattggagcagcctggagggtcattgaaactctcatgtgcagcctctggattcaccttcaattcgtacgccatgaactgggtccgccaggctccaggaaagggtttggaatgggttgctcgcataagaagtaaatataataattatgcaacatattatgccgattcagtgaaagggaggttcaccatctccagagatgattcaaaaaacactgcctatctacaaatgaacaacttgaaaactgaggacactgccgtgtactactgtgtgagacatgggaacttcggtaatagctacctatccttctgggcttactggggccaagggactctggtcaccgtctcctcaggtggtggtggttctggcggcggcggctccggtggtggtggttctgagctcgttgtgactcaggaaccttcactcaccgtatcacctggtggaacagtcacactcacttgtggctcctcgactggggctgttacatctggctactacccaaactgggtccaacaaaaaccaggtcaggcaccccgtggtctaataggtgggactaagttcctcgcccccggtactcctgccagattctcaggctccctgcttggaggcaaggctgccctcaccctctcaggggtacagccagaggatgaggcagaatattactgtgctctatggtacagcaaccgctgggtgttcggtggaggaaccaaactgactgtccta

SEQ ID NO: 63 - protein, 14 aa, artificial
  CDR-L1 of G4H
GSSTGAVTSGYYPN

SEQ ID NO: 64 - protein, 7 aa, artificial
  CDR-L2 of G4H
GTKFLAP

SEQ ID NO: 65 - protein, 9 aa, artificial
  CDR-L3 of G4H
ALWYSNRWV

SEQ ID NO: 66 - protein, 5 aa, artificial
  CDR-H1 of G4H
RYAMN

SEQ ID NO: 67 - protein, 19 aa, artificial
  CDR-H2 of G4H
RIRSKYNNYATYYADSVKG

SEQ ID NO: 68 - protein, 14 aa, artificial
  CDR-H3 of G4H
HGNFGNSYLSYFAY

SEQ ID NO: 69 - protein, 125 aa, artificial
  VH of G4H
EVQLVESGGGLVQPGGSLKLSCAASGFTFNRYAMNWVRQAPGKGLEWVARIRSKYNNYATYYADSVKGRFTISRDDSKNTAYLQMNNLKTEDTAVYYCVRHGNFGNSYLSYFAYWGQGTLVTVSS

SEQ ID NO: 70 - DNA, 375 bp, artificial
  VH of G4H
gaggtgcagctggtcgagtctggaggaggattggtgcagcctggagggtcattgaaactctcatgtgcagcctctggattcaccttcaatcgctacgccatgaactgggtccgccaggctccaggaaagggtttggaatgggttgctcgcataagaagtaaatataataattatgcaacatattatgccgattcagtgaaagggaggttcaccatctccagagatgattcaaaaaacactgcctatctacaaatgaacaacttgaaaactgaggacactgccgtgtactactgtgtgagacatgggaacttcggtaatagctacttatcctacttcgcttactggggccaagggactctggtcaccgtctcctca

SEQ ID NO: 71 - protein, 109 aa, artificial; identical to SEQ ID NO: 17
  VL of G4H

SEQ ID NO: 72 - DNA, 327 bp, artificial; identical to SEQ ID NO: 18
  VL of G4H

SEQ ID NO: 73 - protein, 125 aa, artificial
  VH-P of G4H
EVQLLESGGGLVQPGGSLKLSCAASGFTFNRYAMNWVRQAPGKGLEWVARIRSKYNNYATYYADSVKGRFTISRDDSKNTAYLQMNNLKTEDTAVYYCVRHGNFGNSYLSYFAYWGQGTLVTVSS

SEQ ID NO: 74 - DNA, 375 bp, artificial
  VH-P of G4H
gaggtgcagctgctcgagtctggaggaggattggtgcagcctggagggtcattgaaactctcatgtgcagcctctggattcaccttcaatcgctacgccatgaactgggtccgccaggctccaggaaagggtttggaatgggttgctcgcataagaagtaaatataataattatgcaacatattatgccgattcagtgaaagggaggttcaccatctccagagatgattcaaaaaacactgcctatctacaaatgaacaacttgaaaactgaggacactgccgtgtactactgtgtgagacatgggaacttcggtaatagctacttatcctacttcgcttactggggccaagggactctggtcaccgtctcctca

SEQ ID NO: 75 - protein, 109 aa, artificial; identical to SEQ ID NO: 21
  VL-P of G4H

SEQ ID NO: 76 - DNA, 327 bp, artificial; identical to SEQ ID NO: 22
  VL-P of G4H

SEQ ID NO: 77 - protein, 249 aa, artificial
  VH-VL of G4H
EVQLVESGGGLVQPGGSLKLSCAASGFTFNRYAMNWVRQAPGKGLEWVARIRSKYNNYATYYADSVKGRFTISRDDSKNTAYLQMNNLKTEDTAVYYCVRHGNFGNSYLSYFAYWGQGTLVTVSSGGGGSGGGGSGGGGSQTVVTQEPSLTVSPGGTVTLTCGSSTGAVTSGYYPNWVQQKPGQAPRGLIGGTKFLAPGTPARFSGSLLGGKAALTLSGVQPEDEAEYYCALWYSNRWVFGGGTKLTVL

SEQ ID NO: 78 - DNA, 747 bp, artificial
  VH-VL of G4H
gaggtgcagctggtcgagtctggaggaggattggtgcagcctggagggtcattgaaactctcatgtgcagcctctggattcaccttcaatcgctacgccatgaactgggtccgccaggctccaggaaagggtttggaatgggttgctcgcataagaagtaaatataataattatgcaacatattatgccgattcagtgaaagggaggttcaccatctccagagatgattcaaaaaacactgcctatctacaaatgaacaacttgaaaactgaggacactgccgtgtactactgtgtgagacatgggaacttcggtaatagctacttatcctacttcgcttactggggccaagggactctggtcaccgtctcctcaggtggtggtggttctggcggcggcggctccggtggtggtggttctcagactgttgtgactcaggaaccttcactcaccgtatcacctggtggaacagtcacactcacttgtggctcctcgactggggctgttacatctggctactacccaaactgggtccaacaaaaaccaggtcaggcaccccgtggtctaataggtgggactaagttcctcgcccccggtactcctgccagattctcaggctccctgcttggaggcaaggctgccctcaccctctcaggggtacagccagaggatgaggcagaatattactgtgctctatggtacagcaaccgctgggtgttcggtggaggaaccaaactgactgtccta

SEQ ID NO: 79 - protein, 249 aa, artificial
  VH-VL-P of G4H
EVQLLESGGGLVQPGGSLKLSCAASGFTFNRYAMNWVRQAPGKGLEWVARIRSKYNNYATYYADSVKGRFTISRDDSKNTAYLQMNNLKTEDTAVYYCVRHGNFGNSYLSYFAYWGQGTLVTVSSGGGGSGGGGSGGGGSELVVTQEPSLTVSPGGTVTLTCGSSTGAVTSGYYPNWVQQKPGQAPRGLIGGTKFLAPGTPARFSGSLLGGKAALTLSGVQPEDEAEYYCALWYSNRWVFGGGTKLTVL

SEQ ID NO: 80 - DNA, 747 bp, artificial
  VH-VL-P of G4H
gaggtgcagctgctcgagtctggaggaggattggtgcagcctggagggtcattgaaactctcatgtgcagcctctggattcaccttcaatcgctacgccatgaactgggtccgccaggctccaggaaagggtttggaatgggttgctcgcataagaagtaaatataataattatgcaacatattatgccgattcagtgaaagggaggttcaccatctccagagatgattcaaaaaacactgcctatctacaaatgaacaacttgaaaactgaggacactgccgtgtactactgtgtgagacatgggaacttcggtaatagctacttatcctacttcgcttactggggccaagggactctggtcaccgtctcctcaggtggtggtggttctggcggcggcggctccggtggtggtggttctgagctcgttgtgactcaggaaccttcactcaccgtatcacctggtggaacagtcacactcacttgtggctcctcgactggggctgttacatctggctactacccaaactgggtccaacaaaaaccaggtcaggcaccccgtggtctaataggtgggactaagttcctcgcccccggtactcctgccagattctcaggctccctgcttggaggcaaggctgccctcaccctctcaggggtacagccagaggatgaggcagaatattactgtgctctatggtacagcaaccgctgggtgttcggtggaggaaccaaactgactgtccta

SEQ ID NO: 81 - protein, 14 aa, artificial
  CDR-L1 of A2J
RSSTGAVTSGYYPN

SEQ ID NO: 82 - protein, 7 aa, artificial
  CDR-L2 of A2J
ATDMRPS

SEQ ID NO: 83 - protein, 9 aa, artificial
  CDR-L3 of A2J
ALWYSNRWV

SEQ ID NO: 84 - protein, 5 aa, artificial
  CDR-H1 of A2J
VYAMN

SEQ ID NO: 85 - protein, 19 aa, artificial
  CDR-H2 of A2J
RIRSKYNNYATYYADSVKK

SEQ ID NO: 86 - protein, 14 aa, artificial
  CDR-H3 of A2J
HGNFGNSYLSWWAY

SEQ ID NO: 87 - protein, 125 aa, artificial
  VH of A2J
EVQLVESGGGLVQPGGSLKLSCAASGFTFNVYAMNWVRQAPGKGLEWVARIRSKYNNYATYYADSVKKRFTISRDDSKNTAYLQMNNLKTEDTAVYYCVRHGNFGNSYLSWWAYWGQGTLVTVSS

SEQ ID NO: 88 - DNA, 375 bp, artificial
  VH of A2J
gaggtgcagctggtcgagtctggaggaggattggtgcagcctggagggtcattgaaactctcatgtgcagcctctggattcaccttcaatgtctacgccatgaactgggtccgccaggctccaggaaagggtttggaatgggttgctcgcataagaagtaaatataataattatgcaacatattatgccgattcagtgaaaaagaggttcaccatctccagagatgattcaaaaaacactgcctatctacaaatgaacaacttgaaaactgaggacactgccgtgtactactgtgtgagacatgggaacttcggtaatagctacttatcctggtgggcttactggggccaagggactctggtcaccgtctcctca

SEQ ID NO: 89 - protein, 109 aa, artificial
  VL of A2J
QTVVTQEPSLTVSPGGTVTLTCRSSTGAVTSGYYPNWVQQKPGQAPRGLIGATDMRPSGTPARFSGSLLGGKAALTLSGVQPEDEAEYYCALWYSNRWVFGGGTKLTVL

SEQ ID NO: 90 - DNA, 327 bp, artificial
  VL of A2J
cagactgttgtgactcaggaaccttcactcaccgtatcacctggtggaacagtcacactcacttgtcgctcctcgactggggctgttacatctggctactacccaaactgggtccaacaaaaaccaggtcaggcaccccgtggtctaataggtgccactgacatgaggccctctggtactcctgccagattctcaggctccctgcttggaggcaaggctgccctcaccctctcaggggtacagccagaggatgaggcagaatattactgtgctctatggtacagcaaccgctgggtgttcggtggaggaaccaaactgactgtccta

SEQ ID NO: 91 - protein, 125 aa, artificial
  VH-P of A2J
EVQLLESGGGLVQPGGSLKLSCAASGFTFNVYAMNWVRQAPGKGLEWVARIRSKYNNYATYYADSVKKRFTISRDDSKNTAYLQMNNLKTEDTAVYYCVRHGNFGNSYLSWWAYWGQGTLVTVSS

SEQ ID NO: 92 - DNA, 375 bp, artificial
  VH-P of A2J
gaggtgcagctgctcgagtctggaggaggattggtgcagcctggagggtcattgaaactctcatgtgcagcctctggattcaccttcaatgtctacgccatgaactgggtccgccaggctccaggaaagggtttggaatgggttgctcgcataagaagtaaatataataattatgcaacatattatgccgattcagtgaaaaagaggttcaccatctccagagatgattcaaaaaacactgcctatctacaaatgaacaacttgaaaactgaggacactgccgtgtactactgtgtgagacatgggaacttcggtaatagctacttatcctggtgggcttactggggccaagggactctggtcaccgtctcctca

SEQ ID NO: 93 - protein, 109 aa, artificial
  VL-P of A2J
ELVVTQEPSLTVSPGGTVTLTCRSSTGAVTSGYYPNWVQQKPGQAPRGLIGATDMRPSGTPARFSGSLLGGKAALTLSGVQPEDEAEYYCALWYSNRWVFGGGTKLTVL

SEQ ID NO: 94 - DNA, 327 bp, artificial
  VL-P of A2J
gagctcgttgtgactcaggaaccttcactcaccgtatcacctggtggaacagtcacactcacttgtcgctcctcgactggggctgttacatctggctactacccaaactgggtccaacaaaaaccaggtcaggcaccccgtggtctaataggtgccactgacatgaggccctctggtactcctgccagattctcaggctccctgcttggaggcaaggctgccctcaccctctcaggggtacagccagaggatgaggcagaatattactgtgctctatggtacagcaaccgctgggtgttcggtggaggaaccaaactgactgtccta

SEQ ID NO: 95 - protein, 249 aa, artificial
  VH-VL of A2J
EVQLVESGGGLVQPGGSLKLSCAASGFTFNVYAMNWVRQAPGKGLEWVARIRSKYNNYATYYADSVKKRFTISRDDSKNTAYLQMNNLKTEDTAVYYCVRHGNFGNSYLSWWAYWGQGTLVTVSSGGGGSGGGGSGGGGSQTVVTQEPSLTVSPGGTVTLTCRSSTGAVTSGYYPNWVQQKPGQAPRGLIGATDMRPSGTPARFSGSLLGGKAALTLSGVQPEDEAEYYCALWYSNRWVFGGGTKLTVL

SEQ ID NO: 96 - DNA, 747 bp, artificial
  VH-VL of A2J
gaggtgcagctggtcgagtctggaggaggattggtgcagcctggagggtcattgaaactctcatgtgcagcctctggattcaccttcaatgtctacgccatgaactgggtccgccaggctccaggaaagggtttggaatgggttgctcgcataagaagtaaatataataattatgcaacatattatgccgattcagtgaaaaagaggttcaccatctccagagatgattcaaaaaacactgcctatctacaaatgaacaacttgaaaactgaggacactgccgtgtactactgtgtgagacatgggaacttcggtaatagctacttatcctggtgggcttactggggccaagggactctggtcaccgtctcctcaggtggtggtggttctggcggcggcggctccggtggtggtggttctcagactgttgtgactcaggaaccttcactcaccgtatcacctggtggaacagtcacactcacttgtcgctcctcgactggggctgttacatctggctactacccaaactgggtccaacaaaaaccaggtcaggcaccccgtggtctaataggtgccactgacatgaggccctctggtactcctgccagattctcaggctccctgcttggaggcaaggctgccctcaccctctcaggggtacagccagaggatgaggcagaatattactgtgctctatggtacagcaaccgctgggtgttcggtggaggaaccaaactgactgtccta

SEQ ID NO: 97 - protein, 249 aa, artificial
  VH-VL-P of A2J
EVQLLESGGGLVQPGGSLKLSCAASGFTFNVYAMNWVRQAPGKGLEWVARIRSKYNNYATYYADSVKKRFTISRDDSKNTAYLQMNNLKTEDTAVYYCVRHGNFGNSYLSWWAYWGQGTLVTVSSGGGGSGGGGSGGGGSELVVTQEPSLTVSPGGTVTLTCRSSTGAVTSGYYPNWVQQKPGQAPRGLIGATDMRPSGTPARFSGSLLGGKAALTLSGVQPEDEAEYYCALWYSNRWVFGGGTKLTVL

SEQ ID NO: 98 - DNA, 747 bp, artificial
  VH-VL-P of A2J
gaggtgcagctgctcgagtctggaggaggattggtgcagcctggagggtcattgaaactctcatgtgcagcctctggattcaccttcaatgtctacgccatgaactgggtccgccaggctccaggaaagggtttggaatgggttgctcgcataagaagtaaatataataattatgcaacatattatgccgattcagtgaaaaagaggttcaccatctccagagatgattcaaaaaacactgcctatctacaaatgaacaacttgaaaactgaggacactgccgtgtactactgtgtgagacatgggaacttcggtaatagctacttatcctggtgggcttactggggccaagggactctggtcaccgtctcctcaggtggtggtggttctggcggcggcggctccggtggtggtggttctgagctcgttgtgactcaggaaccttcactcaccgtatcacctggtggaacagtcacactcacttgtcgctcctcgactggggctgttacatctggctactacccaaactgggtccaacaaaaaccaggtcaggcaccccgtggtctaataggtgccactgacatgaggccctctggtactcctgccagattctcaggctccctgcttggaggcaaggctgccctcaccctctcaggggtacagccagaggatgaggcagaatattactgtgctctatggtacagcaaccgctgggtgttcggtggaggaaccaaactgactgtccta

SEQ ID NO: 99 - protein, 14 aa, artificial
  CDR-L1 of E1L
GSSTGAVTSGYYPN

SEQ ID NO: 100 - protein, 7 aa, artificial
  CDR-L2 of E1L
GTKFLAP

SEQ ID NO: 101 - protein, 9 aa, artificial
  CDR-L3 of E1L
ALWYSNRWV

SEQ ID NO: 102 - protein, 5 aa, artificial
  CDR-H1 of E1L
KYAMN

SEQ ID NO: 103 - protein, 19 aa, artificial
  CDR-H2 of E1L
RIRSKYNNYATYYADSVKS

SEQ ID NO: 104 - protein, 14 aa, artificial
  CDR-H3 of E1L
HGNFGNSYTSYYAY

SEQ ID NO: 105 - protein, 125 aa, artificial
  VH of E1L
EVQLVESGGGLVQPGGSLKLSCAASGFTFNKYAMNWVRQAPGKGLEWVARIRSKYNNYATYYADSVKSRFTISRDDSKNTAYLQMNNLKTEDTAVYYCVRHGNFGNSYTSYYAYWGQGTLVTVSS

SEQ ID NO: 106 - DNA, 375 bp, artificial
  VH of E1L
gaggtgcagctggtcgagtctggaggaggattggtgcagcctggagggtcattgaaactctcatgtgcagcctctggattcaccttcaataagtacgccatgaactgggtccgccaggctccaggaaagggtttggaatgggttgctcgcataagaagtaaatataataattatgcaacatattatgccgattcagtgaaatcgaggttcaccatctccagagatgattcaaaaaacactgcctatctacaaatgaacaacttgaaaactgaggacactgccgtgtactactgtgtgagacatgggaacttcggtaatagctacacatcctactacgcttactggggccaagggactctggtcaccgtctcctca

SEQ ID NO: 107 - protein, 109 aa, artificial; identical to SEQ ID NO: 17
  VL of E1L

SEQ ID NO: 108 - DNA, 327 bp, artificial; identical to SEQ ID NO: 18
  VL of E1L

SEQ ID NO: 109 - protein, 125 aa, artificial
  VH-P of E1L
EVQLLESGGGLVQPGGSLKLSCAASGFTFNKYAMNWVRQAPGKGLEWVARIRSKYNNYATYYADSVKSRFTISRDDSKNTAYLQMNNLKTEDTAVYYCVRHGNFGNSYTSYYAYWGQGTLVTVSS

SEQ ID NO: 110 - DNA, 375 bp, artificial
  VH-P of E1L
gaggtgcagctgctcgagtctggaggaggattggtgcagcctggagggtcattgaaactctcatgtgcagcctctggattcaccttcaataagtacgccatgaactgggtccgccaggctccaggaaagggtttggaatgggttgctcgcataagaagtaaatataataattatgcaacatattatgccgattcagtgaaatcgaggttcaccatctccagagatgattcaaaaaacactgcctatctacaaatgaacaacttgaaaactgaggacactgccgtgtactactgtgtgagacatgggaacttcggtaatagctacacatcctactacgcttactggggccaagggactctggtcaccgtctcctca

SEQ ID NO: 111 - protein, 109 aa, artificial; identical to SEQ ID NO: 21
  VL-P of E1L

SEQ ID NO: 112 - DNA, 327 bp, artificial; identical to SEQ ID NO: 22
  VL-P of E1L

SEQ ID NO: 113 - protein, 249 aa, artificial
  VH-VL of E1L
EVQLVESGGGLVQPGGSLKLSCAASGFTFNKYAMNWVRQAPGKGLEWVARIRSKYNNYATYYADSVKSRFTISRDDSKNTAYLQMNNLKTEDTAVYYCVRHGNFGNSYTSYYAYWGQGTLVTVSSGGGGSGGGGSGGGGSQTVVTQEPSLTVSPGGTVTLTCGSSTGAVTSGYYPNWVQQKPGQAPRGLIGGTKFLAPGTPARFSGSLLGGKAALTLSGVQPEDEAEYYCALWYSNRWVFGGGTKLTVL

SEQ ID NO: 114 - DNA, 747 bp, artificial
  VH-VL of E1L
gaggtgcagctggtcgagtctggaggaggattggtgcagcctggagggtcattgaaactctcatgtgcagcctctggattcaccttcaataagtacgccatgaactgggtccgccaggctccaggaaagggtttggaatgggttgctcgcataagaagtaaatataataattatgcaacatattatgccgattcagtgaaatcgaggttcaccatctccagagatgattcaaaaaacactgcctatctacaaatgaacaacttgaaaactgaggacactgccgtgtactactgtgtgagacatgggaacttcggtaatagctacacatcctactacgcttactggggccaagggactctggtcaccgtctcctcaggtggtggtggttctggcggcggcggctccggtggtggtggttctcagactgttgtgactcaggaaccttcactcaccgtatcacctggtggaacagtcacactcacttgtggctcctcgactggggctgttacatctggctactacccaaactgggtccaacaaaaaccaggtcaggcaccccgtggtctaataggtgggactaagttcctcgcccccggtactcctgccagattctcaggctccctgcttggaggcaaggctgccctcaccctctcaggggtacagccagaggatgaggcagaatattactgtgctctatggtacagcaaccgctgggtgttcggtggaggaaccaaactgactgtccta

SEQ ID NO: 115 - protein, 249 aa, artificial
  VH-VL-P of E1L
EVQLLESGGGLVQPGGSLKLSCAASGFTFNKYAMNWVRQAPGKGLEWVARIRSKYNNYATYYADSVKSRFTISRDDSKNTAYLQMNNLKTEDTAVYYCVRHGNFGNSYTSYYAYWGQGTLVTVSSGGGGSGGGGSGGGGSELVVTQEPSLTVSPGGTVTLTCGSSTGAVTSGYYPNWVQQKPGQAPRGLIGGTKFLAPGTPARFSGSLLGGKAALTLSGVQPEDEAEYYCALWYSNRWVFGGGTKLTVL

SEQ ID NO: 116 - DNA, 747 bp, artificial
  VH-VL-P of E1L
gaggtgcagctgctcgagtctggaggaggattggtgcagcctggagggtcattgaaactctcatgtgcagcctctggattcaccttcaataagtacgccatgaactgggtccgccaggctccaggaaagggtttggaatgggttgctcgcataagaagtaaatataataattatgcaacatattatgccgattcagtgaaatcgaggttcaccatctccagagatgattcaaaaaacactgcctatctacaaatgaacaacttgaaaactgaggacactgccgtgtactactgtgtgagacatgggaacttcggtaatagctacacatcctactacgcttactggggccaagggactctggtcaccgtctcctcaggtggtggtggttctggcggcggcggctccggtggtggtggttctgagctcgttgtgactcaggaaccttcactcaccgtatcacctggtggaacagtcacactcacttgtggctcctcgactggggctgttacatctggctactacccaaactgggtccaacaaaaaccaggtcaggcaccccgtggtctaataggtgggactaagttcctcgcccccggtactcctgccagattctcaggctccctgcttggaggcaaggctgccctcaccctctcaggggtacagccagaggatgaggcagaatattactgtgctctatggtacagcaaccgctgggtgttcggtggaggaaccaaactgactgtccta

SEQ ID NO: 117 - protein, 14 aa, artificial
  CDR-L1 of E2M
RSSTGAVTSGYYPN

SEQ ID NO: 118 - protein, 7 aa, artificial
  CDR-L2 of E2M
ATDMRPS

SEQ ID NO: 119 - protein, 9 aa, artificial
  CDR-L3 of E2M
ALWYSNRWV

SEQ ID NO: 120 - protein, 5 aa, artificial
  CDR-H1 of E2M
GYAMN

SEQ ID NO: 121 - protein, 19 aa, artificial
  CDR-H2 of E2M
RIRSKYNNYATYYADSVKE

SEQ ID NO: 122 - protein, 14 aa, artificial
  CDR-H3 of E2M
HRNFGNSYLSWFAY

SEQ ID NO: 123 - protein, 125 aa, artificial
  VH of E2M
EVQLVESGGGLVQPGGSLKLSCAASGFTFNGYAMNWVRQAPGKGLEWVARIRSKYNNYATYYADSVKERFTISRDDSKNTAYLQMNNLKTEDTAVYYCVRHRNFGNSYLSWFAYWGQGTLVTVSS

SEQ ID NO: 124 - DNA, 375 bp, artificial
  VH of E2M
gaggtgcagctggtcgagtctggaggaggattggtgcagcctggagggtcattgaaactctcatgtgcagcctctggattcaccttcaatggctacgccatgaactgggtccgccaggctccaggaaagggtttggaatgggttgctcgcataagaagtaaatataataattatgcaacatattatgccgattcagtgaaagagaggttcaccatctccagagatgattcaaaaaacactgcctatctacaaatgaacaacttgaaaactgaggacactgccgtgtactactgtgtgagacataggaacttcggtaatagctacttatcctggttcgcttactggggccaagggactctggtcaccgtctcctca

SEQ ID NO: 125 - protein, 109 aa, artificial; identical to SEQ ID NO: 89
  VL of E2M

SEQ ID NO: 126 - DNA, 327 bp, artificial; identical to SEQ ID NO: 90
  VL of E2M

SEQ ID NO: 127 - protein, 125 aa, artificial
  VH-P of E2M
EVQLLESGGGLVQPGGSLKLSCAASGFTFNGYAMNWVRQAPGKGLEWVARIRSKYNNYATYYADSVKERFTISRDDSKNTAYLQMNNLKTEDTAVYYCVRHRNFGNSYLSWFAYWGQGTLVTVSS

SEQ ID NO: 128 - DNA, 375 bp, artificial
  VH-P of E2M
gaggtgcagctgctcgagtctggaggaggattggtgcagcctggagggtcattgaaactctcatgtgcagcctctggattcaccttcaatggctacgccatgaactgggtccgccaggctccaggaaagggtttggaatgggttgctcgcataagaagtaaatataataattatgcaacatattatgccgattcagtgaaagagaggttcaccatctccagagatgattcaaaaaacactgcctatctacaaatgaacaacttgaaaactgaggacactgccgtgtactactgtgtgagacataggaacttcggtaatagctacttatcctggttcgcttactggggccaagggactctggtcaccgtctcctca

SEQ ID NO: 129 - protein, 109 aa, artificial; identical to SEQ ID NO: 93
  VL-P of E2M

SEQ ID NO: 130 - DNA, 327 bp, artificial; identical to SEQ ID NO: 94
  VL-P of E2M

SEQ ID NO: 131 - protein, 249 aa, artificial
  VH-VL of E2M
EVQLVESGGGLVQPGGSLKLSCAASGFTFNGYAMNWVRQAPGKGLEWVARIRSKYNNYATYYADSVKERFTISRDDSKNTAYLQMNNLKTEDTAVYYCVRHRNFGNSYLSWFAYWGQGTLVTVSSGGGGSGGGGSGGGGSQTVVTQEPSLTVSPGGTVTLTCRSSTGAVTSGYYPNWVQQKPGQAPRGLIGATDMRPSGTPARFSGSLLGGKAALTLSGVQPEDEAEYYCALWYSNRWVFGGGTKLTVL

SEQ ID NO: 132 - DNA, 747 bp, artificial
  VH-VL of E2M
gaggtgcagctggtcgagtctggaggaggattggtgcagcctggagggtcattgaaactctcatgtgcagcctctggattcaccttcaatggctacgccatgaactgggtccgccaggctccaggaaagggtttggaatgggttgctcgcataagaagtaaatataataattatgcaacatattatgccgattcagtgaaagagaggttcaccatctccagagatgattcaaaaaacactgcctatctacaaatgaacaacttgaaaactgaggacactgccgtgtactactgtgtgagacataggaacttcggtaatagctacttatcctggttcgcttactggggccaagggactctggtcaccgtctcctcaggtggtggtggttctggcggcggcggctccggtggtggtggttctcagactgttgtgactcaggaaccttcactcaccgtatcacctggtggaacagtcacactcacttgtcgctcctcgactggggctgttacatctggctactacccaaactgggtccaacaaaaaccaggtcaggcaccccgtggtctaataggtgccactgacatgaggccctctggtactcctgccagattctcaggctccctgcttggaggcaaggctgccctcaccctctcaggggtacagccagaggatgaggcagaatattactgtgctctatggtacagcaaccgctgggtgttcggtggaggaaccaaactgactgtccta

SEQ ID NO: 133 - protein, 249 aa, artificial
  VH-VL-P of E2M
EVQLLESGGGLVQPGGSLKLSCAASGFTFNGYAMNWVRQAPGKGLEWVARIRSKYNNYATYYADSVKERFTISRDDSKNTAYLQMNNLKTEDTAVYYCVRHRNFGNSYLSWFAYWGQGTLVTVSSGGGGSGGGGSGGGGSELVVTQEPSLTVSPGGTVTLTCRSSTGAVTSGYYPNWVQQKPGQAPRGLIGATDMRPSGTPARFSGSLLGGKAALTLSGVQPEDEAEYYCALWYSNRWVFGGGTKLTVL

SEQ ID NO: 134 - DNA, 747 bp, artificial
  VH-VL-P of E2M
gaggtgcagctgctcgagtctggaggaggattggtgcagcctggagggtcattgaaactctcatgtgcagcctctggattcaccttcaatggctacgccatgaactgggtccgccaggctccaggaaagggtttggaatgggttgctcgcataagaagtaaatataataattatgcaacatattatgccgattcagtgaaagagaggttcaccatctccagagatgattcaaaaaacactgcctatctacaaatgaacaacttgaaaactgaggacactgccgtgtactactgtgtgagacataggaacttcggtaatagctacttatcctggttcgcttactggggccaagggactctggtcaccgtctcctcaggtggtggtggttctggcggcggcggctccggtggtggtggttctgagctcgttgtgactcaggaaccttcactcaccgtatcacctggtggaacagtcacactcacttgtcgctcctcgactggggctgttacatctggctactacccaaactgggtccaacaaaaaccaggtcaggcaccccgtggtctaataggtgccactgacatgaggccctctggtactcctgccagattctcaggctccctgcttggaggcaaggctgccctcaccctctcaggggtacagccagaggatgaggcagaatattactgtgctctatggtacagcaaccgctgggtgttcggtggaggaaccaaactgactgtccta

SEQ ID NO: 135 - protein, 14 aa, artificial
  CDR-L1 of F7O
GSSTGAVTSGYYPN

SEQ ID NO: 136 - protein, 7 aa, artificial
  CDR-L2 of F7O
GTKFLAP

SEQ ID NO: 137 - protein, 9 aa, artificial
  CDR-L3 of F7O
ALWYSNRWV

SEQ ID NO: 138 - protein, 5 aa, artificial
  CDR-H1 of F7O
VYAMN

SEQ ID NO: 139 - protein, 19 aa, artificial
  CDR-H2 of F7O
RIRSKYNNYATYYADSVKK

SEQ ID NO: 140 - protein, 14 aa, artificial
  CDR-H3 of F7O
HGNFGNSYISWWAY

SEQ ID NO: 141 - protein, 125 aa, artificial
  VH of F7O
EVQLVESGGGLVQPGGSLKLSCAASGFTFNVYAMNWVRQAPGKGLEWVARIRSKYNNYATYYADSVKKRFTISRDDSKNTAYLQMNNLKTEDTAVYYCVRHGNFGNSYISWWAYWGQGTLVTVSS

SEQ ID NO: 142 - DNA, 375 bp, artificial
  VH of F7O
gaggtgcagctggtcgagtctggaggaggattggtgcagcctggagggtcattgaaactctcatgtgcagcctctggattcaccttcaatgtgtacgccatgaactgggtccgccaggctccaggaaagggtttggaatgggttgctcgcataagaagtaaatataataattatgcaacatattatgccgattcagtgaaaaagaggttcaccatctccagagatgattcaaaaaacactgcctatctacaaatgaacaacttgaaaactgaggacactgccgtgtactactgtgtgagacatgggaacttcggtaatagctacatatcctggtgggcttactggggccaagggactctggtcaccgtctcctca

SEQ ID NO: 143 - protein, 109 aa, artificial; identical to SEQ ID NO: 17
  VL of F7O

SEQ ID NO: 144 - DNA, 327 bp, artificial; identical to SEQ ID NO: 18
  VL of F7O

SEQ ID NO: 145 - protein, 125 aa, artificial
  VH-P of F7O
EVQLLESGGGLVQPGGSLKLSCAASGFTFNVYAMNWVRQAPGKGLEWVARIRSKYNNYATYYADSVKKRFTISRDDSKNTAYLQMNNLKTEDTAVYYCVRHGNFGNSYISWWAYWGQGTLVTVSS

SEQ ID NO: 146 - DNA, 375 bp, artificial
  VH-P of F7O
gaggtgcagctgctcgagtctggaggaggattggtgcagcctggagggtcattgaaactctcatgtgcagcctctggattcaccttcaatgtgtacgccatgaactgggtccgccaggctccaggaaagggtttggaatgggttgctcgcataagaagtaaatataataattatgcaacatattatgccgattcagtgaaaaagaggttcaccatctccagagatgattcaaaaaacactgcctatctacaaatgaacaacttgaaaactgaggacactgccgtgtactactgtgtgagacatgggaacttcggtaatagctacatatcctggtgggcttactggggccaagggactctggtcaccgtctcctca

SEQ ID NO: 147 - protein, 109 aa, artificial; identical to SEQ ID NO: 21
  VL-P of F7O

SEQ ID NO: 148 - DNA, 327 bp, artificial; identical to SEQ ID NO: 22
  VL-P of F7O

SEQ ID NO: 149 - protein, 249 aa, artificial
  VH-VL of F7O
EVQLVESGGGLVQPGGSLKLSCAASGFTFNVYAMNWVRQAPGKGLEWVARIRSKYNNYATYYADSVKKRFTISRDDSKNTAYLQMNNLKTEDTAVYYCVRHGNFGNSYISWWAYWGQGTLVTVSSGGGGSGGGGSGGGGSQTVVTQEPSLTVSPGGTVTLTCGSSTGAVTSGYYPNWVQQKPGQAPRGLIGGTKFLAPGTPARFSGSLLGGKAALTLSGVQPEDEAEYYCALWYSNRWVFGGGTKLTVL

SEQ ID NO: 150 - DNA, 747 bp, artificial
  VH-VL of F7O
gaggtgcagctggtcgagtctggaggaggattggtgcagcctggagggtcattgaaactctcatgtgcagcctctggattcaccttcaatgtgtacgccatgaactgggtccgccaggctccaggaaagggtttggaatgggttgctcgcataagaagtaaatataataattatgcaacatattatgccgattcagtgaaaaagaggttcaccatctccagagatgattcaaaaaacactgcctatctacaaatgaacaacttgaaaactgaggacactgccgtgtactactgtgtgagacatgggaacttcggtaatagctacatatcctggtgggcttactggggccaagggactctggtcaccgtctcctcaggtggtggtggttctggcggcggcggctccggtggtggtggttctcagactgttgtgactcaggaaccttcactcaccgtatcacctggtggaacagtcacactcacttgtggctcctcgactggggctgttacatctggctactacccaaactgggtccaacaaaaaccaggtcaggcaccccgtggtctaataggtgggactaagttcctcgcccccggtactcctgccagattctcaggctccctgcttggaggcaaggctgccctcaccctctcaggggtacagccagaggatgaggcagaatattactgtgctctatggtacagcaaccgctgggtgttcggtggaggaaccaaactgactgtccta

SEQ ID NO: 151 - protein, 249 aa, artificial
  VH-VL-P of F7O
EVQLLESGGGLVQPGGSLKLSCAASGFTFNVYAMNWVRQAPGKGLEWVARIRSKYNNYATYYADSVKKRFTISRDDSKNTAYLQMNNLKTEDTAVYYCVRHGNFGNSYISWWAYWGQGTLVTVSSGGGGSGGGGSGGGGSELVVTQEPSLTVSPGGTVTLTCGSSTGAVTSGYYPNWVQQKPGQAPRGLIGGTKFLAPGTPARFSGSLLGGKAALTLSGVQPEDEAEYYCALWYSNRWVFGGGTKLTVL

SEQ ID NO: 152 - DNA, 747 bp, artificial
  VH-VL-P of F7O
gaggtgcagctgctcgagtctggaggaggattggtgcagcctggagggtcattgaaactctcatgtgcagcctctggattcaccttcaatgtgtacgccatgaactgggtccgccaggctccaggaaagggtttggaatgggttgctcgcataagaagtaaatataataattatgcaacatattatgccgattcagtgaaaaagaggttcaccatctccagagatgattcaaaaaacactgcctatctacaaatgaacaacttgaaaactgaggacactgccgtgtactactgtgtgagacatgggaacttcggtaatagctacatatcctggtgggcttactggggccaagggactctggtcaccgtctcctcaggtggtggtggttctggcggcggcggctccggtggtggtggttctgagctcgttgtgactcaggaaccttcactcaccgtatcacctggtggaacagtcacactcacttgtggctcctcgactggggctgttacatctggctactacccaaactgggtccaacaaaaaccaggtcaggcaccccgtggtctaataggtgggactaagttcctcgcccccggtactcctgccagattctcaggctccctgcttggaggcaaggctgccctcaccctctcaggggtacagccagaggatgaggcagaatattactgtgctctatggtacagcaaccgctgggtgttcggtggaggaaccaaactgactgtccta

SEQ ID NO: 153 - protein, 14 aa, artificial
  CDR-L1 of F12Q
GSSTGAVTSGNYPN

SEQ ID NO: 154 - protein, 7 aa, artificial
  CDR-L2 of F12Q
GTKFLAP

SEQ ID NO: 155 - protein, 9 aa, artificial
  CDR-L3 of F12Q
VLWYSNRWV

SEQ ID NO: 156 - protein, 5 aa, artificial
  CDR-H1 of F12Q
SYAMN

SEQ ID NO: 157 - protein, 19 aa, artificial
  CDR-H2 of F12Q
RIRSKYNNYATYYADSVKG

SEQ ID NO: 158 - protein, 14 aa, artificial
  CDR-H3 of F12Q
HGNFGNSYVSWWAY

SEQ ID NO: 159 - protein, 125 aa, artificial
  VH of F12Q
EVQLVESGGGLVQPGGSLKLSCAASGFTFNSYAMNWVRQAPGKGLEWVARIRSKYNNYATYYADSVKGRFTISRDDSKNTAYLQMNNLKTEDTAVYYCVRHGNFGNSYVSWWAYWGQGTLVTVSS

SEQ ID NO: 160 - DNA, 375 bp, artificial
  VH of F12Q
gaggtgcagctggtcgagtctggaggaggattggtgcagcctggagggtcattgaaactctcatgtgcagcctctggattcaccttcaatagctacgccatgaactgggtccgccaggctccaggaaagggtttggaatgggttgctcgcataagaagtaaatataataattatgcaacatattatgccgattcagtgaaaggcaggttcaccatctccagagatgattcaaaaaacactgcctatctacaaatgaacaacttgaaaactgaggacactgccgtgtactactgtgtgagacatgggaacttcggtaatagctacgtttcctggtgggcttactggggccaagggactctggtcaccgtctcctca

SEQ ID NO: 161 - protein, 109 aa, artificial
  VL of F12Q
QTVVTQEPSLTVSPGGTVTLTCGSSTGAVTSGNYPNWVQQKPGQAPRGLIGGTKFLAPGTPARFSGSLLGGKAALTLSGVQPEDEAEYYCVLWYSNRWVFGGGTKLTVL

SEQ ID NO: 162 - DNA, 327 bp, artificial
  VL of F12Q
cagactgttgtgactcaggaaccttcactcaccgtatcacctggtggaacagtcacactcacttgtggctcctcgactggggctgttacatctggcaactacccaaactgggtccaacaaaaaccaggtcaggcaccccgtggtctaataggtgggactaagttcctcgcccccggtactcctgccagattctcaggctccctgcttggaggcaaggctgccctcaccctctcaggggtacagccagaggatgaggcagaatattactgtgttctatggtacagcaaccgctgggtgttcggtggaggaaccaaactgactgtccta

SEQ ID NO: 163 - protein, 125 aa, artificial
  VH-P of F12Q
EVQLLESGGGLVQPGGSLKLSCAASGFTFNSYAMNWVRQAPGKGLEWVARIRSKYNNYATYYADSVKGRFTISRDDSKNTAYLQMNNLKTEDTAVYYCVRHGNFGNSYVSWWAYWGQGTLVTVSS

SEQ ID NO: 164 - DNA, 375 bp, artificial
  VH-P of F12Q
gaggtgcagctgctcgagtctggaggaggattggtgcagcctggagggtcattgaaactctcatgtgcagcctctggattcaccttcaatagctacgccatgaactgggtccgccaggctccaggaaagggtttggaatgggttgctcgcataagaagtaaatataataattatgcaacatattatgccgattcagtgaaaggcaggttcaccatctccagagatgattcaaaaaacactgcctatctacaaatgaacaacttgaaaactgaggacactgccgtgtactactgtgtgagacatgggaacttcggtaatagctacgtttcctggtgggcttactggggccaagggactctggtcaccgtctcctca

SEQ ID NO: 165 - protein, 109 aa, artificial
  VL-P of F12Q
ELVVTQEPSLTVSPGGTVTLTCGSSTGAVTSGNYPNWVQQKPGQAPRGLIGGTKFLAPGTPARFSGSLLGGKAALTLSGVQPEDEAEYYCVLWYSNRWVFGGGTKLTVL

SEQ ID NO: 166 - DNA, 327 bp, artificial
  VL-P of F12Q
gagctcgttgtgactcaggaaccttcactcaccgtatcacctggtggaacagtcacactcacttgtggctcctcgactggggctgttacatctggcaactacccaaactgggtccaacaaaaaccaggtcaggcaccccgtggtctaataggtgggactaagttcctcgcccccggtactcctgccagattctcaggctccctgcttggaggcaaggctgccctcaccctctcaggggtacagccagaggatgaggcagaatattactgtgttctatggtacagcaaccgctgggtgttcggtggaggaaccaaactgactgtccta

SEQ ID NO: 167 - protein, 249 aa, artificial
  VH-VL of F12Q
EVQLVESGGGLVQPGGSLKLSCAASGFTFNSYAMNWVRQAPGKGLEWVARIRSKYNNYATYYADSVKGRFTISRDDSKNTAYLQMNNLKTEDTAVYYCVRHGNFGNSYVSWWAYWGQGTLVTVSSGGGGSGGGGSGGGGSQTVVTQEPSLTVSPGGTVTLTCGSSTGAVTSGNYPNWVQQKPGQAPRGLIGGTKFLAPGTPARFSGSLLGGKAALTLSGVQPEDEAEYYCVLWYSNRWVFGGGTKLTVL

SEQ ID NO: 168 - DNA, 747 bp, artificial
  VH-VL of F12Q
gaggtgcagctggtcgagtctggaggaggattggtgcagcctggagggtcattgaaactctcatgtgcagcctctggattcaccttcaatagctacgccatgaactgggtccgccaggctccaggaaagggtttggaatgggttgctcgcataagaagtaaatataataattatgcaacatattatgccgattcagtgaaaggcaggttcaccatctccagagatgattcaaaaaacactgcctatctacaaatgaacaacttgaaaactgaggacactgccgtgtactactgtgtgagacatgggaacttcggtaatagctacgtttcctggtgggcttactggggccaagggactctggtcaccgtctcctcaggtggtggtggttctggcggcggcggctccggtggtggtggttctcagactgttgtgactcaggaaccttcactcaccgtatcacctggtggaacagtcacactcacttgtggctcctcgactggggctgttacatctggcaactacccaaactgggtccaacaaaaaccaggtcaggcaccccgtggtctaataggtgggactaagttcctcgcccccggtactcctgccagattctcaggctccctgcttggaggcaaggctgccctcaccctctcaggggtacagccagaggatgaggcagaatattactgtgttctatggtacagcaaccgctgggtgttcggtggaggaaccaaactgactgtccta

SEQ ID NO: 169 - protein, 249 aa, artificial
  VH-VL-P of F12Q
EVQLLESGGGLVQPGGSLKLSCAASGFTFNSYAMNWVRQAPGKGLEWVARIRSKYNNYATYYADSVKGRFTISRDDSKNTAYLQMNNLKTEDTAVYYCVRHGNFGNSYVSWWAYWGQGTLVTVSSGGGGSGGGGSGGGGSELVVTQEPSLTVSPGGTVTLTCGSSTGAVTSGNYPNWVQQKPGQAPRGLIGGTKFLAPGTPARFSGSLLGGKAALTLSGVQPEDEAEYYCVLWYSNRWVFGGGTKLTVL

SEQ ID NO: 170 - DNA, 747 bp, artificial
  VH-VL-P of F12Q
gaggtgcagctgctcgagtctggaggaggattggtgcagcctggagggtcattgaaactctcatgtgcagcctctggattcaccttcaatagctacgccatgaactgggtccgccaggctccaggaaagggtttggaatgggttgctcgcataagaagtaaatataataattatgcaacatattatgccgattcagtgaaaggcaggttcaccatctccagagatgattcaaaaaacactgcctatctacaaatgaacaacttgaaaactgaggacactgccgtgtactactgtgtgagacatgggaacttcggtaatagctacgtttcctggtgggcttactggggccaagggactctggtcaccgtctcctcaggtggtggtggttctggcggcggcggctccggtggtggtggttctgagctcgttgtgactcaggaaccttcactcaccgtatcacctggtggaacagtcacactcacttgtggctcctcgactggggctgttacatctggcaactacccaaactgggtccaacaaaaaccaggtcaggcaccccgtggtctaataggtgggactaagttcctcgcccccggtactcctgccagattctcaggctccctgcttggaggcaaggctgccctcaccctctcaggggtacagccagaggatgaggcagaatattactgtgttctatggtacagcaaccgctgggtgttcggtggaggaaccaaactgactgtccta

SEQ ID NO: 171 - protein, 14 aa, artificial
  CDR-L1 of I2C
GSSTGAVTSGNYPN

SEQ ID NO: 172 - protein, 7 aa, artificial
  CDR-L2 of I2C
GTKFLAP

SEQ ID NO: 173 - protein, 9 aa, artificial
  CDR-L3 of I2C
VLWYSNRWV

SEQ ID NO: 174 - protein, 5 aa, artificial
  CDR-H1 of I2C
KYAMN

SEQ ID NO: 175 - protein, 19 aa, artificial
  CDR-H2 of I2C
RIRSKYNNYATYYADSVKD

SEQ ID NO: 176 - protein, 14 aa, artificial
  CDR-H3 of I2C
HGNFGNSYISYWAY

SEQ ID NO: 177 - protein, 125 aa, artificial; identical to SEQ ID NO: 33
  VH of I2C

SEQ ID NO: 178 - DNA, 375 bp, artificial; identical to SEQ ID NO: 34
  VH of I2C

SEQ ID NO: 179 - protein, 109 aa, artificial; identical to SEQ ID NO: 161
  VL of I2C

SEQ ID NO: 180 - DNA, 327 bp, artificial; identical to SEQ ID NO: 162
  VL of I2C

SEQ ID NO: 181 - protein, 125 aa, artificial; identical to SEQ ID NO: 37
  VH-P of I2C

SEQ ID NO: 182 - DNA, 375 bp, artificial; identical to SEQ ID NO: 38
  VH-P of I2C

SEQ ID NO: 183 - protein, 109 aa, artificial; identical to SEQ ID NO: 165
  VL-P of I2C

SEQ ID NO: 184 - DNA, 327 bp, artificial; identical to SEQ ID NO: 166
  VL-P of I2C

SEQ ID NO: 185 - protein, 249 aa, artificial
  VH-VL of I2C
EVQLVESGGGLVQPGGSLKLSCAASGFTFNKYAMNWVRQAPGKGLEWVARIRSKYNNYATYYADSVKDRFTISRDDSKNTAYLQMNNLKTEDTAVYYCVRHGNFGNSYISYWAYWGQGTLVTVSSGGGGSGGGGSGGGGSQTVVTQEPSLTVSPGGTVTLTCGSSTGAVTSGNYPNWVQQKPGQAPRGLIGGTKFLAPGTPARFSGSLLGGKAALTLSGVQPEDEAEYYCVLWYSNRWVFGGGTKLTVL

SEQ ID NO: 186 - DNA, 747 bp, artificial
  VH-VL of I2C
gaggtgcagctggtcgagtctggaggaggattggtgcagcctggagggtcattgaaactctcatgtgcagcctctggattcaccttcaataagtacgccatgaactgggtccgccaggctccaggaaagggtttggaatgggttgctcgcataagaagtaaatataataattatgcaacatattatgccgattcagtgaaagacaggttcaccatctccagagatgattcaaaaaacactgcctatctacaaatgaacaacttgaaaactgaggacactgccgtgtactactgtgtgagacatgggaacttcggtaatagctacatatcctactgggcttactggggccaagggactctggtcaccgtctcctcaggtggtggtggttctggcggcggcggctccggtggtggtggttctcagactgttgtgactcaggaaccttcactcaccgtatcacctggtggaacagtcacactcacttgtggctcctcgactggggctgttacatctggcaactacccaaactgggtccaacaaaaaccaggtcaggcaccccgtggtctaataggtgggactaagttcctcgcccccggtactcctgccagattctcaggctccctgcttggaggcaaggctgccctcaccctctcaggggtacagccagaggatgaggcagaatattactgtgttctatggtacagcaaccgctgggtgttcggtggaggaaccaaactgactgtccta

SEQ ID NO: 187 - protein, 249 aa, artificial
  VH-VL-P of I2C
EVQLLESGGGLVQPGGSLKLSCAASGFTFNKYAMNWVRQAPGKGLEWVARIRSKYNNYATYYADSVKDRFTISRDDSKNTAYLQMNNLKTEDTAVYYCVRHGNFGNSYISYWAYWGQGTLVTVSSGGGGSGGGGSGGGGSELVVTQEPSLTVSPGGTVTLTCGSSTGAVTSGNYPNWVQQKPGQAPRGLIGGTKFLAPGTPARFSGSLLGGKAALTLSGVQPEDEAEYYCVLWYSNRWVFGGGTKLTVL

SEQ ID NO: 188 - DNA, 747 bp, artificial
  VH-VL-P of I2C
gaggtgcagctgctcgagtctggaggaggattggtgcagcctggagggtcattgaaactctcatgtgcagcctctggattcaccttcaataagtacgccatgaactgggtccgccaggctccaggaaagggtttggaatgggttgctcgcataagaagtaaatataataattatgcaacatattatgccgattcagtgaaagacaggttcaccatctccagagatgattcaaaaaacactgcctatctacaaatgaacaacttgaaaactgaggacactgccgtgtactactgtgtgagacatgggaacttcggtaatagctacatatcctactgggcttactggggccaagggactctggtcaccgtctcctcaggtggtggtggttctggcggcggcggctccggtggtggtggttctgagctcgttgtgactcaggaaccttcactcaccgtatcacctggtggaacagtcacactcacttgtggctcctcgactggggctgttacatctggcaactacccaaactgggtccaacaaaaaccaggtcaggcaccccgtggtctaataggtgggactaagttcctcgcccccggtactcctgccagattctcaggctccctgcttggaggcaaggctgccctcaccctctcaggggtacagccagaggatgaggcagaatattactgtgttctatggtacagcaaccgctgggtgttcggtggaggaaccaaactgactgtccta

SEQ ID NO: 189 - protein, 267 aa, artificial
  1-27 CD3 epsilon-Fc
QDGNEEMGGITQTPYKVSISGTTVILTSGEPKSCDKTHTCPPCPAPELLGGPSVFLFPPKPKDTLMISRTPEVTCVVVDVSHEDPEVKFNWYVDGVEVHNAKTKPREEQYNSTYRVVSVLTVLHQDWLNGKEYKCKVSNKALPAPIEKTISKAKGQPREPQVYTLPPSREEMTKNQVSLTCLVKGFYPSDIAVEWESNGQPENNYKTTPPVLDSDGSFFLYSKLTVDKSRWQQGNVFSCSVMHEALHNHYTQKSLSLSPGKHHHHHH

SEQ ID NO: 190 - DNA, 858 bp, artificial
  1-27 CD3 epsilon-Fc
atgggatggagctgtatcatcctcttcttggtagcaacagctacaggtgtacactcccaagatggtaatgaagaaatgggtggtattacacagacaccatataaagtctccatctctggaaccacagtaatattgacatccggagagcccaaatcttgtgacaaaactcacacatgcccaccgtgcccagcacctgaactcctggggggaccgtcagtcttcctcttccccccaaaacccaaggacaccctcatgatctcccggacccctgaggtcacatgcgtggtggtggacgtgagccacgaagaccctgaggtcaagttcaactggtacgtggacggcgtggaggtgcataatgccaagacaaagccgcgggaggagcagtacaacagcacgtaccgtgtggtcagcgtcctcaccgtcctgcaccaggactggctgaatggcaaggagtacaagtgcaaggtctccaacaaagccctcccagcccccatcgagaaaaccatctccaaagccaaagggcagccccgagaaccacaggtgtacaccctgcccccatcccgggaggagatgaccaagaaccaggtcagcctgacctgcctggtcaaaggcttctatcccagcgacatcgccgtggagtgggagagcaatgggcagccggagaacaactacaagaccacgcctcccgtgctggactccgacggctccttcttcctctatagcaagctcaccgtggacaagagcaggtggcagcaggggaacgtcttctcatgctccgtgatgcatgaggctctgcacaaccactacacgcagaagagcctctccctgtccccgggtaaacatcatcaccatcatcat

SEQ ID NO: 191 - protein, 333 aa, artificial
  human 1-27 CD3 epsilon-Fc-EpCAM
QDGNEEMGGITQTPYKVSISGTTVILTDYKDDDDKTASFAAAQKECVCENYKLAVNCFLNDNGQCQCTSIGAQNTVLCSKLAAKCLVMKAEMNGSKLGRRAKPEGALQNNDGLYDPDCDESGLFKAKQCNGTSTCWCVNTAGVRRTDKDTEITCSERVRTYWIIIELKHKAREKPYDVQSLRTALEEAIKTRYQLDPKFITNILYEDNVITIDLVQNSSQKTQNDVDIADVAYYFEKDVKGESLFHSKKMDLRVNGEQLDLDPGQTLIYYVDEKAPEFSMQGLKAGVIAVIVVVVIAIVAGIVVLVISRKKRMAKYEKAEIKEMGEMHRELNA

SEQ ID NO: 192 - DNA, 1056 bp, artificial
  human 1-27 CD3 epsilon-EpCAM
atgggatggagctgtatcatcctcttcttggtagcaacagctacaggtgtacactcccaagatggtaatgaagaaatgggtggtattacacagacaccatataaagtctccatctctggaaccacagtaatattgacagattacaaggacgacgatgacaagactgcgagttttgccgcagctcagaaagaatgtgtctgtgaaaactacaagctggccgtaaactgctttttgaatgacaatggtcaatgccagtgtacttcgattggtgcacaaaatactgtcctttgctcaaagctggctgccaaatgtttggtgatgaaggcagaaatgaacggctcaaaacttgggagaagagcgaaacctgaaggggctctccagaacaatgatggcctttacgatcctgactgcgatgagagcgggctctttaaggccaagcagtgcaacggcacctccacgtgctggtgtgtgaacactgctggggtcagaagaactgacaaggacactgaaataacctgctctgagcgagtgagaacctactggatcatcattgaattaaaacacaaagcaagagaaaaaccttatgatgttcaaagtttgcggactgcacttgaggaggcgatcaaaacgcgttatcaactggatccaaaatttatcacaaatattttgtatgaggataatgttatcactattgatctggttcaaaattcttctcagaaaactcagaatgatgtggacatagctgatgtggcttattattttgaaaaagatgttaaaggtgaatccttgtttcattctaagaaaatggacctgagagtaaatggggaacaactggatctggatcctggtcaaactttaatttattatgtcgatgaaaaagcacctgaattctcaatgcagggtctaaaagctggtgttattgctgttattgtggttgtggtgatagcaattgttgctggaattgttgtgctggttatttccagaaagaagagaatggcaaagtatgagaaggctgagataaaggagatgggtgagatgcatagggaactcaatgca

SEQ ID NO: 193 - protein, 333 aa, artificial
  marmoset 1-27 CD3 epsilon-EpCAM
QDGNEEMGDTTQNPYKVSISGTTVTLTDYKDDDDKTASFAAAQKECVCENYKLAVNCFLNDNGQCQCTSIGAQNTVLCSKLAAKCLVMKAEMNGSKLGRRAKPEGALQNNDGLYDPDCDESGLFKAKQCNGTSTCWCVNTAGVRRTDKDTEITCSERVRTYWIIIELKHKAREKPYDVQSLRTALEEAIKTRYQLDPKFITNILYEDNVITIDLVQNSSQKTQNDVDIADVAYYFEKDVKGESLFHSKKMDLRVNGEQLDLDPGQTLIYYVDEKAPEFSMQGLKAGVIAVIVVVVIAIVAGIVVLVISRKKRMAKYEKAEIKEMGEMHRELNA

SEQ ID NO: 194 - DNA, 1056 bp, artificial
  marmoset 1-27 CD3 epsilon-EpCAM
atgggatggagctgtatcatcctcttcttggtagcaacagctacaggtgtacactcccaggacggtaatgaagaaatgggtgatactacacagaacccatataaagtttccatctcaggaaccacagtaacactgacagattacaaggacgacgatgacaagactgcgagttttgccgcagctcagaaagaatgtgtctgtgaaaactacaagctggccgtaaactgctttttgaatgacaatggtcaatgccagtgtacttcgattggtgcacaaaatactgtcctttgctcaaagctggctgccaaatgtttggtgatgaaggcagaaatgaacggctcaaaacttgggagaagagcgaaacctgaaggggctctccagaacaatgatggcctttacgatcctgactgcgatgagagcgggctctttaaggccaagcagtgcaacggcacctccacgtgctggtgtgtgaacactgctggggtcagaagaactgacaaggacactgaaataacctgctctgagcgagtgagaacctactggatcatcattgaattaaaacacaaagcaagagaaaaaccttatgatgttcaaagtttgcggactgcacttgaggaggcgatcaaaacgcgttatcaactggatccaaaatttatcacaaatattttgtatgaggataatgttatcactattgatctggttcaaaattcttctcagaaaactcagaatgatgtggacatagctgatgtggcttattattttgaaaaagatgttaaaggtgaatccttgtttcattctaagaaaatggacctgagagtaaatggggaacaactggatctggatcctggtcaaactttaatttattatgtcgatgaaaaagcacctgaattctcaatgcagggtctaaaagctggtgttattgctgttattgtggttgtggtgatagcaattgttgctggaattgttgtgctggttatttccagaaagaagagaatggcaaagtatgagaaggctgagataaaggagatgggtgagatgcatagggaactcaatgca

SEQ ID NO: 195 - protein, 333 aa, artificial; identical to SEQ ID NO: 193
  tamarin 1-27 CD3 epsilon-EpCAM

SEQ ID NO: 196 - DNA, 1056 bp, artificial; identical to SEQ ID NO: 194
  tamarin 1-27 CD3 epsilon-EpCAM

SEQ ID NO: 197 - protein, 369 aa, artificial
  squirrel monkey 1-27 CD3 epsilon-EpCAM
QDGNEEIGDTTQNPYKVSISGTTVTLTDYKDDDDKTASFAAAQKECVCENYKLAVNCFLNDNGQCQCTSIGAQNTVLCSKLAAKCLVMKAEMNGSKLGRRAKPEGALQNNDGLYDPDCDESGLFKAKQCNGTSTCWCVNTAGVRRTDKDTEITCSERVRTYWIIIELKHKAREKPYDVQSLRTALEEAIKTRYQLDPKFITNILYEDNVITIDLVQNSSQKTQNDVDIADVAYYFEKDVKGESLFHSKKMDLRVNGEQLDLDPGQTLIYYVDEKAPEFSMQGLKAGVIAVIVVVVIAIVAGIVVLVISRKKRMAKYEKAEIKEMGEMHRELNAAAGGAGATGGGTGAGATGCATAGGGAACTCAATGCA

SEQ ID NO: 198 - DNA, 1056 bp, artificial
  squirrel monkey 1-27 CD3 epsilon-EpCAM
atgggatggagctgtatcatcctcttcttggtagcaacagctacaggtgtacactcccaggacggtaatgaagagattggtgatactacccagaacccatataaagtttccatctcaggaaccacagtaacactgacagattacaaggacgacgatgacaagactgcgagttttgccgcagctcagaaagaatgtgtctgtgaaaactacaagctggccgtaaactgctttttgaatgacaatggtcaatgccagtgtacttcgattggtgcacaaaatactgtcctttgctcaaagctggctgccaaatgtttggtgatgaaggcagaaatgaacggctcaaaacttgggagaagagcgaaacctgaaggggctctccagaacaatgatggcctttacgatcctgactgcgatgagagcgggctctttaaggccaagcagtgcaacggcacctccacgtgctggtgtgtgaacactgctggggtcagaagaactgacaaggacactgaaataacctgctctgagcgagtgagaacctactggatcatcattgaattaaaacacaaagcaagagaaaaaccttatgatgttcaaagtttgcggactgcacttgaggaggcgatcaaaacgcgttatcaactggatccaaaatttatcacaaatattttgtatgaggataatgttatcactattgatctggttcaaaattcttctcagaaaactcagaatgatgtggacatagctgatgtggcttattattttgaaaaagatgttaaaggtgaatccttgtttcattctaagaaaatggacctgagagtaaatggggaacaactggatctggatcctggtcaaactttaatttattatgtcgatgaaaaagcacctgaattctcaatgcagggtctaaaagctggtgttattgctgttattgtggttgtggtgatagcaattgttgctggaattgttgtgctggttatttccagaaagaagagaatggcaaagtatgagaaggctgagataaaggagatgggtgagatgcatagggaactcaatgca

SEQ ID NO: 199 - protein, 333 aa, artificial
  swine 1-27 CD3 epsilon-EpCAM
QEDIERPDEDTQKTFKVSISGDKVELTDYKDDDDKTASFAAAQKECVCENYKLAVNCFLNDNGQCQCTSIGAQNTVLCSKLAAKCLVMKAEMNGSKLGRRAKPEGALQNNDGLYDPDCDESGLFKAKQCNGTSTCWCVNTAGVRRTDKDTEITCSERVRTYWIIIELKHKAREKPYDVQSLRTALEEAIKTRYQLDPKFITNILYEDNVITIDLVQNSSQKTQNDVDIADVAYYFEKDVKGESLFHSKKMDLRVNGEQLDLDPGQTLIYYVDEKAPEFSMQGLKAGVIAVIVVVVIAIVAGIVVLVISRKKRMAKYEKAEIKEMGEMHRELNA

SEQ ID NO: 200 - DNA, 1056 bp, artificial
  swine 1-27 CD3 epsilon-EpCAM
atgggatggagctgtatcatcctcttcttggtagcaacagctacaggtgtacactcccaagaagacattgaaagaccagatgaagatacacagaaaacatttaaagtctccatctctggagacaaagtagagctgacagattacaaggacgacgatgacaagactgcgagttttgccgcagctcagaaagaatgtgtctgtgaaaactacaagctggccgtaaactgctttttgaatgacaatggtcaatgccagtgtacttcgattggtgcacaaaatactgtcctttgctcaaagctggctgccaaatgtttggtgatgaaggcagaaatgaacggctcaaaacttgggagaagagcgaaacctgaaggggctctccagaacaatgatggcctttacgatcctgactgcgatgagagcgggctctttaaggccaagcagtgcaacggcacctccacgtgctggtgtgtgaacactgctggggtcagaagaactgacaaggacactgaaataacctgctctgagcgagtgagaacctactggatcatcattgaattaaaacacaaagcaagagaaaaaccttatgatgttcaaagtttgcggactgcacttgaggaggcgatcaaaacgcgttatcaactggatccaaaatttatcacaaatattttgtatgaggataatgttatcactattgatctggttcaaaattcttctcagaaaactcagaatgatgtggacatagctgatgtggcttattattttgaaaaagatgttaaaggtgaatccttgtttcattctaagaaaatggacctgagagtaaatggggaacaactggatctggatcctggtcaaactttaatttattatgtcgatgaaaaagcacctgaattctcaatgcagggtctaaaagctggtgttattgctgttattgtggttgtggtgatagcaattgttgctggaattgttgtgctggttatttccagaaagaagagaatggcaaagtatgagaaggctgagataaaggagatgggtgagatgcatagggaactcaatgca

SEQ ID NO: 201 - protein, 186 aa, Homo sapiens
QDGNEEMGGITQTPYKVSISGTTVILTCPQYPGSEILWQHNDKNIGGDEDDKNIGSDEDHLSLKEFSELEQSGYYVCYPRGSKPEDANFYLYLRARVCENCMEMDVMSVATIVIVDICITGGLLLLVYYWSKNRKAKAKPVTRGAGAGGRQRGQNKERPPPVPNPDYEPIRKGQRDLYSGLNQRRI

SEQ ID NO: 202 - DNA, 621 bp, Homo sapiens
atgcagtcgggcactcactggagagttctgggcctctgcctcttatcagttggcgtttgggggcaagatggtaatgaagaaatgggtggtattacacagacaccatataaagtctccatctctggaaccacagtaatattgacatgccctcagtatcctggatctgaaatactatggcaacacaatgataaaaacataggcggtgatgaggatgataaaaacataggcagtgatgaggatcacctgtcactgaaggaattttcagaattggagcaaagtggttattatgtctgctaccccagaggaagcaaaccagaagatgcgaacttttatctctacctgagggcacgcgtgtgtgagaactgcatggagatggatgtgatgtcggtggccacaattgtcatagtggacatctgcatcactgggggcttgctgctgctggtttactactggagcaagaatagaaaggccaaggccaagcctgtgacacgaggagcgggtgctggcggcaggcaaaggggacaaaacaaggagaggccaccacctgttcccaacccagactatgagcccatccggaaaggccagcgggacctgtattctggcctgaatcagagacgcatc

SEQ ID NO: 203 - protein, 19 aa, artificial
  immunoglobulin leader peptide
MGWSCIILFLVATATGVHS

SEQ ID NO: 204 - DNA, 57 bp, artificial
  immunoglobulin leader peptide
atgggatggagctgtatcatcctcttcttggtagcaacagctacaggtgtacactcc

SEQ ID NO: 205 - protein, 324 aa, Mus sp.
AKTTPPSVYPLAPGSAAQTNSMVTLGCLVKGYFPEPVTVTWNSGSLSSGVHTFPAVLQSDLYTLSSSVTVPSSTWPSETVTCNVAHPASSTKVDKKIVPRDCGCKPCICTVPEVSSVFIFPPKPKDVLTITLTPKVTCVVVDISKDDPEVQFSWFVDDVEVHTAQTQPREEQFNSTFRSVSELPIMHQDWLNGKEFKCRVNSAAFPAPIEKTISKTKGRPKAPQVYTIPPPKEQMAKDKVSLTCMITDFFPEDITVEWQWNGQPAENYKNTQPIMDTDGSYFVYSKLNVQKSNWEAGNTFTCSVLHEGLHNHHTEKSLSHSPGK

SEQ ID NO: 206 - DNA, 972 bp, Mus sp.
gccaaaacgacacccccatctgtctatccactggcccctggatctgctgcccaaactaactccatggtgaccctgggatgcctggtcaagggctatttccctgagccagtgacagtgacctggaactctggatccctgtccagcggtgtgcacaccttcccagctgtcctgcagtctgacctctacactctgagcagctcagtgactgtcccctccagcacctggcccagcgagaccgtcacctgcaacgttgcccacccggccagcagcaccaaggtggacaagaaaattgtgcccagggattgtggttgtaagccttgcatatgtacagtcccagaagtatcatctgtcttcatcttccccccaaagcccaaggatgtgctcaccattactctgactcctaaggtcacgtgtgttgtggtagacatcagcaaggatgatcccgaggtccagttcagctggtttgtagatgatgtggaggtgcacacagctcagacgcaaccccgggaggagcagttcaacagcactttccgctcagtcagtgaacttcccatcatgcaccaggactggctcaatggcaaggagttcaaatgcagggtcaacagtgcagctttccctgcccccatcgagaaaaccatctccaaaaccaaaggcagaccgaaggctccacaggtgtacaccattccacctcccaaggagcagatggccaaggataaagtcagtctgacctgcatgataacagacttcttccctgaagacattactgtggagtggcagtggaatgggcagccagcggagaactacaagaacactcagcccatcatggacacagatggctcttacttcgtctacagcaagctcaatgtgcagaagagcaactgggaggcaggaaatactttcacctgctctgtgttacatgagggcctgcacaaccaccatactgagaagagcctctcccactctcctggtaaa

SEQ ID NO: 207 - protein, 106 aa, Homo sapiens
GQPKAAPSVTLFPPSSEELQANKATLVCLISDFYPGAVTVAWKADSSPVKAGVETTTPSKQSNNKYAASSYLSLTPEQWKSHKSYSCQVTHEGSTVEKTVAPTECS

SEQ ID NO: 208 - DNA, 318 bp, Homo sapiens
ggtcagcccaaggctgccccctcggtcactctgttcccaccctcctctgaggagcttcaagccaacaaggccacactggtgtgtctcataagtgacttctacccgggagccgtgacagtggcctggaaggcagatagcagccccgtcaaggcgggagtggagaccaccacaccctccaaacaaagcaacaacaagtacgcggccagcagctacctgagcctgacgcctgagcagtggaagtcccacaaaagctacagctgccaggtcacgcatgaagggagcaccgtggagaagacagtggcccctacagaatgttca

SEQ ID NO: 209 - DNA, 843 bp, artificial
  1-27 CD3-Fc + leader
atgggatggagctgtatcatcctcttcttggtagcaacagctacaggtgtacactcccaagatggtaatgaagaaatgggtggtattacacagacaccatataaagtctccatctctggaaccacagtaatattgacatccggagagcccaaatcttgtgacaaaactcacacatgcccaccgtgcccagcacctgaactcctggggggaccgtcagtcttcctcttccccccaaaacccaaggacaccctcatgatctcccggacccctgaggtcacatgcgtggtggtggacgtgagccacgaagaccctgaggtcaagttcaactggtacgtggacggcgtggaggtgcataatgccaagacaaagccgcgggaggagcagtacaacagcacgtaccgtgtggtcagcgtcctcaccgtcctgcaccaggactggctgaatggcaaggagtacaagtgcaaggtctccaacaaagccctcccagcccccatcgagaaaaccatctccaaagccaaagggcagccccgagaaccacaggtgtacaccctgcccccatcccgggaggagatgaccaagaaccaggtcagcctgacctgcctggtcaaaggcttctatcccagcgacatcgccgtggagtgggagagcaatgggcagccggagaacaactacaagaccacgcctcccgtgctggactccgacggctccttcttcctctatagcaagctcaccgtggacaagagcaggtggcagcaggggaacgtcttctcatgctccgtgatgcatgaggctctgcacaaccactacacgcagaagagcctctccctgtccccgggtaaatag

SEQ ID NO: 210 - protein, 280 aa, artificial
  1-27 CD3-Fc + leader
MGWSCIILFLVATATGVHSQDGNEEMGGITQTPYKVSISGTTVILTSGEPKSCDKTHTCPPCPAPELLGGPSVFLFPPKPKDTLMISRTPEVTCVVVDVSHEDPEVKFNWYVDGVEVHNAKTKPREEQYNSTYRVVSVLTVLHQDWLNGKEYKCKVSNKALPAPIEKTISKAKGQPREPQVYTLPPSREEMTKNQVSLTCLVKGFYPSDIAVEWESNGQPENNYKTTPPVLDSDGSFFLYSKLTVDKSRWQQGNVFSCSVMHEALHNHYTQKSLSLSPGK

SEQ ID NO: 211 - protein, 8 aa, Homo sapiens
QDGNEEMG

SEQ ID NO: 212 - protein, 8 aa, Saimiri sciureus
QDGNEEIG

SEQ ID NO: 213 - DNA, 21 bp, artificial
  forward primer
cactgtggcccaggttcgagg

SEQ ID NO: 214 - DNA, 25 bp, artificial
  reverse primer
gacataccacacaaattcaatacgg

SEQ ID NO: 215 - DNA, 23 bp, artificial
  forward primer
gctctgctcgcgccgagatgtgg

SEQ ID NO: 216 - DNA, 21 bp, artificial
  reverse primer
acgctggacaccacctccagg

SEQ ID NO: 217 - DNA, 22 bp, artificial
  forward primer
ggttctactgagtgggcagagg

SEQ ID NO: 218 - DNA, 22 bp, artificial
  reverse primer
acttgttgtggctgcttggagc

SEQ ID NO: 219 - DNA, 22 bp, artificial
  forward primer
gggtgaagtcctatccagatgg

SEQ ID NO: 220 - DNA, 22 bp, artificial
  reverse primer
gtgctctgcctgaagcaattcc

SEQ ID NO: 221 - DNA, 21 bp, artificial
  forward primer
ctcggcttcctcttcgggtgg

SEQ ID NO: 222 - DNA, 26 bp, artificial
  reverse primer
gcatattcatttgctgggtaacctgg

SEQ ID NO: 223 - DNA, 2253 bp, artificial
  macaque PSMA (Cynomolgus)
atgtggaatctcctgcacgaaaccgactcggctgtggccaccgcgcgccgcccgcgctggctgtgcgctggggcactggtgctggcgggtggcttctttctcctcggcttcctcttcggatggtttataaaatcctccagtgaagctactaacattactccaaagcataatatgaaagcatttttggatgaactgaaagctgagaacatcaagaagttcttacataattttacacagataccacatttagcaggaacagaacaaaactttcaacttgcaaagcaaattcaatcccagtggaaagaatttggcctggattctgttgagctaactcattatgatgtcctgttgtcctacccaaataagactcatcccaactacatctcaataattaatgaagatggaaatgagattttcaacacatcattatttgaaccacctcctgcaggatatgaaaatgtttcggatattgtaccacctttcagtgctttctctcctcaaggaatgccagagggcgatctagtgtatgttaactatgcacgaactgaagacttctttaaattggaacgggacatgaaaatcaattgctctgggaaaattgtaattgccagatatgggaaagttttcagaggaaataaggttaaaaatgcccagctggcaggggccacaggagtcattctctactcagaccctgctgactactttgctcctggggtaaagtcttatccagatggttggaatcttcctggaggtggtgtccagcgtggaaatatcctaaatctgaatggtgcaggagaccctctcacaccaggttacccagcaaatgaatatgcttataggcgtggaatggcagaggctgttggtcttccaagtattcccgttcatccaattgggtactatgatgcacagaagctcctagaaaaaatgggtggctcagcatcaccagatagcagctggagaggaagtctcaaagtgccctacaatgttggacctggctttactggaaacttttctacacaaaaagtcaagatgcacatccactctaccagtgaagtgacaagaatttacaatgtgataggtactctcagaggagcagtggaaccagacagatacgtcattctgggaggtcaccgggactcatgggtgtttggtggtattgaccctcagagtggagcagctgttgttcatgaaattgtgaggagctttggaacgctgaaaaaggaagggtggagacctagaagaacaattttgtttgcaagctgggatgcagaagaatttggtcttcttggttctactgaatgggcagaggagaattcaagactccttcaagagcgtggcgtggcttatattaatgctgattcgtctatagagggaaactacactctgagagttgattgtacaccactgatgtacagcttggtatacaacctaacaaaagagctggaaagccctgatgaaggctttgaaggcaaatctctttatgaaagttggactaaaaaaagtccttcccccgagttcagtggcatgcccaggataagcaaattgggatctggaaatgattttgaggtgttcttccaacgacttggaattgcctcaggcagagcacggtatactaaaaattgggaaacaaacaaattcagcagctatccactgtatcacagtgtctatgagacatatgagttggtggaaaagttttatgatccaatgtttaaatatcacctcactgtggcccaggttcgaggagggatggtgtttgaactagccaattccgtagtgctcccttttgattgtcgagattatgctgtagttttaagaaagtatgctgacaaaatctacaatatttctatgaaacatccacaggaaatgaagacatacagtgtatcatttgattcacttttttctgcagtaaagaattttacagaaattgcttccaagttcagcgagagactccgggactttgacaaaagcaacccaatattattaagaatgatgaatgatcaactcatgtttctggaaagagcatttattgatccattagggttaccagacagacctttttataggcatgtcatctatgctccaagcagccacaacaagtatgcaggggagtcattcccaggaatttatgatgctctgtttgatatcgaaagcaaagtggacccttcccaggcctggggagaagtgaagagacagatttctgttgcaaccttcacagtgcaagcagctgcagagactttgagtgaagtggcctaa

SEQ ID NO: 224 - protein, 750 aa, artificial
  macaque PSMA (Cynomolgus)
MWNLLHETDSAVATARRPRWLCAGALVLAGGFFLLGFLFGWFIKSSSEATNITPKHNMKAFLDELKAENIKKFLHNFTQIPHLAGTEQNFQLAKQIQSQWKEFGLDSVELTHYDVLLSYPNKTHPNYISIINEDGNEIFNTSLFEPPPAGYENVSDIVPPFSAFSPQGMPEGDLVYVNYARTEDFFKLERDMKINCSGKIVIARYGKVFRGNKVKNAQLAGATGVILYSDPADYFAPGVKSYPDGWNLPGGGVQRGNILNLNGAGDPLTPGYPANEYAYRRGMAEAVGLPSIPVHPIGYYDAQKLLEKMGGSASPDSSWRGSLKVPYNVGPGFTGNFSTQKVKMHIHSTSEVTRIYNVIGTLRGAVEPDRYVILGGHRDSWVFGGIDPQSGAAVVHEIVRSFGTLKKEGWRPRRTILFASWDAEEFGLLGSTEWAEENSRLLQERGVAYINADSSIEGNYTLRVDCTPLMYSLVYNLTKELESPDEGFEGKSLYESWTKKSPSPEFSGMPRISKLGSGNDFEVFFQRLGIASGRARYTKNWETNKFSSYPLYHSVYETYELVEKFYDPMFKYHLTVAQVRGGMVFELANSVVLPFDCRDYAVVLRKYADKIYNISMKHPQEMKTYSVSFDSLFSAVKNFTEIASKFSERLRDFDKSNPILLRMMNDQLMFLERAFIDPLGLPDRPFYRHVIYAPSSHNKYAGESFPGIYDALFDIESKVDPSQAWGEVKRQISVATFTVQAAAETLSEVA

SEQ ID NO: 225 - protein, 120 aa, artificial
  PM52C3-VH
QVQLVQSGAEVKKPGASVKLSCKASGYTFTYFDINWVRQTPEQGLEWMGGISPGDGNTNYNENFKGRVTMTRDTSSSTAYMELSRLRSDDTAVYYCARDGNFPYYAMDSWGQGTTVTVSS

SEQ ID NO: 226 - protein, 5 aa, artificial
  PM52C3-HCDR1
YFDIN

SEQ ID NO: 227 - protein, 17 aa, artificial
  PM52C3-HCDR2
GISPGDGNTNYNENFKG

SEQ ID NO: 228 - protein, 11 aa, artificial
  PM52C3-HCDR3
DGNFPYYAMDS

SEQ ID NO: 229 - DNA, 360 bp, artificial
  PM52C3-VH
caggtgcagctggtccagtctggcgccgaagtgaagaagcctggcgcctccgtgaagctgtcctgcaaggcctccggctacaccttcacctacttcgacatcaactgggtgcggcagacgcctgagcagggcctggaatggatgggcggcatctcccctggcgacggcaacaccaactacaacgagaacttcaagggcagggtcacaatgaccagagacacgtcctcatccaccgcctacatggagctgtcccggctgagatctgacgacaccgccgtgtactactgcgccagggacggcaacttcccttactacgccatggactcttggggccagggcaccacggtcaccgtctcctca

SEQ ID NO: 230 - protein, 112 aa, artificial
  PM52C3-VL
DVVMTQSPLSLPVTLGEPASISCRSSQSLVYSNGNTYLHWYQQKPGQSPRLLIYKVSNRFSGVPDRFSGSGSGTDFTLKISRVEAEDVGVYFCSQSTHVPYTFGQGTKLEIK

SEQ ID NO: 231 - protein, 16 aa, artificial
  PM52C3-LCDR1
RSSQSLVYSNGNTYLH

SEQ ID NO: 232 - protein, 7 aa, artificial
  PM52C3-LCDR2
KVSNRFS

SEQ ID NO: 233 - protein, 9 aa, artificial
  PM52C3-LCDR3
SQSTHVPYT

SEQ ID NO: 234 - DNA, 336 bp, artificial
  PM52C3-VL
gacgtcgtgatgactcagtctccactctccctgcccgtcacccttggagagccggcctccatctcctgcaggtctagtcaaagcctcgtatacagtaacggaaacacctacttgcattggtatcaacagaagccaggccaatctccaagactcctaatttataaggtttctaaccggttctctggggtcccagacagattcagcggcagtgggtcaggcactgatttcacactgaaaatcagcagggtggaggctgaggatgttggggtttatttctgctctcaaagtacacatgttccgtacacgtttggccaggggaccaagctggagatcaaa

SEQ ID NO: 235 - protein, 247 aa, artificial
  PM52C3-VH-VL
QVQLVQSGAEVKKPGASVKLSCKASGYTFTYFDINWVRQTPEQGLEWMGGISPGDGNTNYNENFKGRVTMTRDTSSSTAYMELSRLRSDDTAVYYCARDGNFPYYAMDSWGQGTTVTVSSGGGGSGGGGSGGGGSDVVMTQSPLSLPVTLGEPASISCRSSQSLVYSNGNTYLHWYQQKPGQSPRLLIYKVSNRFSGVPDRFSGSGSGTDFTLKISRVEAEDVGVYFCSQSTHVPYTFGQGTKLEIK

SEQ ID NO: 236 - DNA, 741 bp, artificial
  PM52C3-VH-VL
caggtgcagctggtccagtctggcgccgaagtgaagaagcctggcgcctccgtgaagctgtcctgcaaggcctccggctacaccttcacctacttcgacatcaactgggtgcggcagacgcctgagcagggcctggaatggatgggcggcatctcccctggcgacggcaacaccaactacaacgagaacttcaagggcagggtcacaatgaccagagacacgtcctcatccaccgcctacatggagctgtcccggctgagatctgacgacaccgccgtgtactactgcgccagggacggcaacttcccttactacgccatggactcttggggccagggcaccacggtcaccgtctcctcaggtggtggtggttctggcggcggcggctccggtggtggtggttctgacgtcgtgatgactcagtctccactctccctgcccgtcacccttggagagccggcctccatctcctgcaggtctagtcaaagcctcgtatacagtaacggaaacacctacttgcattggtatcaacagaagccaggccaatctccaagactcctaatttataaggtttctaaccggttctctggggtcccagacagattcagcggcagtgggtcaggcactgatttcacactgaaaatcagcagggtggaggctgaggatgttggggtttatttctgctctcaaagtacacatgttccgtacacgtttggccaggggaccaagctggagatcaaa

SEQ ID NO: 237 - protein, 502 aa, artificial
  PM52C3-VH-VL x I2C VH-VL
QVQLVQSGAEVKKPGASVKLSCKASGYTFTYFDINWVRQTPEQGLEWMGGISPGDGNTNYNENFKGRVTMTRDTSSSTAYMELSRLRSDDTAVYYCARDGNFPYYAMDSWGQGTTVTVSSGGGGSGGGGSGGGGSDVVMTQSPLSLPVTLGEPASISCRSSQSLVYSNGNTYLHWYQQKPGQSPRLLIYKVSNRFSGVPDRFSGSGSGTDFTLKISRVEAEDVGVYFCSQSTHVPYTFGQGTKLEIKSGGGGSEVQLVESGGGLVQPGGSLKLSCAASGFTFNKYAMNWVRQAPGKGLEWVARIRSKYNNYATYYADSVKDRFTISRDDSKNTAYLQMNNLKTEDTAVYYCVRHGNFGNSYISYWAYWGQGTLVTVSSGGGGSGGGGSGGGGSQTVVTQEPSLTVSPGGTVTLTCGSSTGAVTSGNYPNWVQQKPGQAPRGLIGGTKFLAPGTPARFSGSLLGGKAALTLSGVQPEDEAEYYCVLWYSNRWVFGGGTKLTVL

SEQ ID NO: 238 - DNA, 1506 bp, artificial
  PM52C3-VH-VL x I2C VH-VL
caggtgcagctggtccagtctggcgccgaagtgaagaagcctggcgcctccgtgaagctgtcctgcaaggcctccggctacaccttcacctacttcgacatcaactgggtgcggcagacgcctgagcagggcctggaatggatgggcggcatctcccctggcgacggcaacaccaactacaacgagaacttcaagggcagggtcacaatgaccagagacacgtcctcatccaccgcctacatggagctgtcccggctgagatctgacgacaccgccgtgtactactgcgccagggacggcaacttcccttactacgccatggactcttggggccagggcaccacggtcaccgtctcctcaggtggtggtggttctggcggcggcggctccggtggtggtggttctgacgtcgtgatgactcagtctccactctccctgcccgtcacccttggagagccggcctccatctcctgcaggtctagtcaaagcctcgtatacagtaacggaaacacctacttgcattggtatcaacagaagccaggccaatctccaagactcctaatttataaggtttctaaccggttctctggggtcccagacagattcagcggcagtgggtcaggcactgatttcacactgaaaatcagcagggtggaggctgaggatgttggggtttatttctgctctcaaagtacacatgttccgtacacgtttggccaggggaccaagctggagatcaaatccggaggtggtggatccgaggtgcagctggtcgagtctggaggaggattggtgcagcctggagggtcattgaaactctcatgtgcagcctctggattcaccttcaataagtacgccatgaactgggtccgccaggctccaggaaagggtttggaatgggttgctcgcataagaagtaaatataataattatgcaacatattatgccgattcagtgaaagacaggttcaccatctccagagatgattcaaaaaacactgcctatctacaaatgaacaacttgaaaactgaggacactgccgtgtactactgtgtgagacatgggaacttcggtaatagctacatatcctactgggcttactggggccaagggactctggtcaccgtctcctcaggtggtggtggttctggcggcggcggctccggtggtggtggttctcagactgttgtgactcaggaaccttcactcaccgtatcacctggtggaacagtcacactcacttgtggctcctcgactggggctgttacatctggcaactacccaaactgggtccaacaaaaaccaggtcaggcaccccgtggtctaataggtgggactaagttcctcgcccccggtactcctgccagattctcaggctccctgcttggaggcaaggctgccctcaccctctcaggggtacagccagaggatgaggcagaatattactgtgttctatggtacagcaaccgctgggtgttcggtggaggaaccaaactgactgtccta

SEQ ID NO: 239 - protein, 120 aa, artificial
  PM52H3-VH
QVQLVQSGAEVKKPGASVKLSCKASGYTFTYFDINWVRQTPEQGLEWMGGISPGDGNTNYNENFKGRVTMTRDTSKSTAYMELSRLRSDDTAVYYCARDGNFPYYAMDSWGQGTTVTVSS

SEQ ID NO: 240 - protein, 5 aa, artificial
  PM52H3-HCDR1
YFDIN

SEQ ID NO: 241 - protein, 17 aa, artificial
  PM52H3-HCDR2
GISPGDGNTNYNENFKG

SEQ ID NO: 242 - protein, 11 aa, artificial
  PM52H3-HCDR3
DGNFPYYAMDS

SEQ ID NO: 243 - DNA, 360 bp, artificial
  PM52H3-VH
caggtgcagctggtccagtctggcgccgaagtgaagaagcctggcgcctccgtgaagctgtcctgcaaggcctccggctacaccttcacctacttcgacatcaactgggtgcggcagacgcctgagcagggcctggaatggatgggcggcatctcccctggcgacggcaacaccaactacaacgagaacttcaagggcagggtcacaatgaccagagacacgtccaaatccaccgcctacatggagctgtcccggctgagatctgacgacaccgccgtgtactactgcgccagggacggcaacttcccttactacgccatggactcttggggccagggcaccacggtcaccgtctcctca

SEQ ID NO: 244 - protein, 112 aa, artificial; identical to SEQ ID NO: 230
  PM52H3-VL

SEQ ID NO: 245 - protein, 16 aa, artificial
  PM52H3-LCDR1
RSSQSLVYSNGNTYLH

SEQ ID NO: 246 - protein, 7 aa, artificial
  PM52H3-LCDR2
KVSNRFS

SEQ ID NO: 247 - protein, 9 aa, artificial
  PM52H3-LCDR3
SQSTHVPYT

SEQ ID NO: 248 - DNA, 336 bp, artificial; identical to SEQ ID NO: 234
  PM52H3-VL

SEQ ID NO: 249 - protein, 247 aa, artificial
  PM52H3-VH-VL
QVQLVQSGAEVKKPGASVKLSCKASGYTFTYFDINWVRQTPEQGLEWMGGISPGDGNTNYNENFKGRVTMTRDTSKSTAYMELSRLRSDDTAVYYCARDGNFPYYAMDSWGQGTTVTVSSGGGGSGGGGSGGGGSDVVMTQSPLSLPVTLGEPASISCRSSQSLVYSNGNTYLHWYQQKPGQSPRLLIYKVSNRFSGVPDRFSGSGSGTDFTLKISRVEAEDVGVYFCSQSTHVPYTFGQGTKLEIK

SEQ ID NO: 250 - DNA, 741 bp, artificial
  PM52H3-VH-VL
caggtgcagctggtccagtctggcgccgaagtgaagaagcctggcgcctccgtgaagctgtcctgcaaggcctccggctacaccttcacctacttcgacatcaactgggtgcggcagacgcctgagcagggcctggaatggatgggcggcatctcccctggcgacggcaacaccaactacaacgagaacttcaagggcagggtcacaatgaccagagacacgtccaaatccaccgcctacatggagctgtcccggctgagatctgacgacaccgccgtgtactactgcgccagggacggcaacttcccttactacgccatggactcttggggccagggcaccacggtcaccgtctcctcaggtggtggtggttctggcggcggcggctccggtggtggtggttctgacgtcgtgatgactcagtctccactctccctgcccgtcacccttggagagccggcctccatctcctgcaggtctagtcaaagcctcgtatacagtaacggaaacacctacttgcattggtatcaacagaagccaggccaatctccaagactcctaatttataaggtttctaaccggttctctggggtcccagacagattcagcggcagtgggtcaggcactgatttcacactgaaaatcagcagggtggaggctgaggatgttggggtttatttctgctctcaaagtacacatgttccgtacacgtttggccaggggaccaagctggagatcaaa

SEQ ID NO: 251 - protein, 502 aa, artificial
  PM52H3-VH-VL x I2C VH-VL
QVQLVQSGAEVKKPGASVKLSCKASGYTFTYFDINWVRQTPEQGLEWMGGISPGDGNTNYNENFKGRVTMTRDTSKSTAYMELSRLRSDDTAVYYCARDGNFPYYAMDSWGQGTTVTVSSGGGGSGGGGSGGGGSDVVMTQSPLSLPVTLGEPASISCRSSQSLVYSNGNTYLHWYQQKPGQSPRLLIYKVSNRFSGVPDRFSGSGSGTDFTLKISRVEAEDVGVYFCSQSTHVPYTFGQGTKLEIKSGGGGSEVQLVESGGGLVQPGGSLKLSCAASGFTFNKYAMNWVRQAPGKGLEWVARIRSKYNNYATYYADSVKDRFTISRDDSKNTAYLQMNNLKTEDTAVYYCVRHGNFGNSYISYWAYWGQGTLVTVSSGGGGSGGGGSGGGGSQTVVTQEPSLTVSPGGTVTLTCGSSTGAVTSGNYPNWVQQKPGQAPRGLIGGTKFLAPGTPARFSGSLLGGKAALTLSGVQPEDEAEYYCVLWYSNRWVFGGGTKLTVL

SEQ ID NO: 252 - DNA, 1506 bp, artificial
  PM52H3-VH-VL x I2C VH-VL
caggtgcagctggtccagtctggcgccgaagtgaagaagcctggcgcctccgtgaagctgtcctgcaaggcctccggctacaccttcacctacttcgacatcaactgggtgcggcagacgcctgagcagggcctggaatggatgggcggcatctcccctggcgacggcaacaccaactacaacgagaacttcaagggcagggtcacaatgaccagagacacgtccaaatccaccgcctacatggagctgtcccggctgagatctgacgacaccgccgtgtactactgcgccagggacggcaacttcccttactacgccatggactcttggggccagggcaccacggtcaccgtctcctcaggtggtggtggttctggcggcggcggctccggtggtggtggttctgacgtcgtgatgactcagtctccactctccctgcccgtcacccttggagagccggcctccatctcctgcaggtctagtcaaagcctcgtatacagtaacggaaacacctacttgcattggtatcaacagaagccaggccaatctccaagactcctaatttataaggtttctaaccggttctctggggtcccagacagattcagcggcagtgggtcaggcactgatttcacactgaaaatcagcagggtggaggctgaggatgttggggtttatttctgctctcaaagtacacatgttccgtacacgtttggccaggggaccaagctggagatcaaatccggaggtggtggatccgaggtgcagctggtcgagtctggaggaggattggtgcagcctggagggtcattgaaactctcatgtgcagcctctggattcaccttcaataagtacgccatgaactgggtccgccaggctccaggaaagggtttggaatgggttgctcgcataagaagtaaatataataattatgcaacatattatgccgattcagtgaaagacaggttcaccatctccagagatgattcaaaaaacactgcctatctacaaatgaacaacttgaaaactgaggacactgccgtgtactactgtgtgagacatgggaacttcggtaatagctacatatcctactgggcttactggggccaagggactctggtcaccgtctcctcaggtggtggtggttctggcggcggcggctccggtggtggtggttctcagactgttgtgactcaggaaccttcactcaccgtatcacctggtggaacagtcacactcacttgtggctcctcgactggggctgttacatctggcaactacccaaactgggtccaacaaaaaccaggtcaggcaccccgtggtctaataggtgggactaagttcctcgcccccggtactcctgccagattctcaggctccctgcttggaggcaaggctgccctcaccctctcaggggtacagccagaggatgaggcagaatattactgtgttctatggtacagcaaccgctgggtgttcggtggaggaaccaaactgactgtccta

SEQ ID NO: 253 - protein, 120 aa, artificial
  PM75A10-VH
QVQLVQSGAEVKKPGASVKLSCKASGYTFTYFDINWVRQTPEQGLEWMGGISPGDGNTNYNENFKGRVTMTRDTSSSTAYMELSRLRSDDTAVYYCARDGNFPYYAMVNWGQGTTVTVSS

SEQ ID NO: 254 - protein, 5 aa, artificial
  PM75A10-HCDR1
YFDIN

SEQ ID NO: 255 - protein, 17 aa, artificial
  PM75A10-HCDR2
GISPGDGNTNYNENFKG

SEQ ID NO: 256 - protein, 11 aa, artificial
  PM75A10-HCDR3
DGNFPYYAMVN

SEQ ID NO: 257 - DNA, 360 bp, artificial
  PM75A10-VH
caggtgcagctggtccagtctggcgccgaagtgaagaagcctggcgcctccgtgaagctgtcctgcaaggcctccggctacaccttcacctacttcgacatcaactgggtgcggcagacgcctgagcagggcctggaatggatgggcggcatctcccctggcgacggcaacaccaactacaacgagaacttcaagggcagggtcacaatgaccagagacacgtcctcatccaccgcctacatggagctgtcccggctgagatctgacgacaccgccgtgtactactgcgccagggacggcaacttcccttactacgcgatggtcaactggggccagggcaccacggtcaccgtctcctca

SEQ ID NO: 258 - protein, 112 aa, artificial; identical to SEQ ID NO: 230
  PM75A10-VL

SEQ ID NO: 259 - protein, 16 aa, artificial
  PM75A10-LCDR1
RSSQSLVYSNGNTYLH

SEQ ID NO: 260 - protein, 7 aa, artificial
  PM75A10-LCDR2
KVSNRFS

SEQ ID NO: 261 - protein, 9 aa, artificial
  PM75A10-LCDR3
SQSTHVPYT

SEQ ID NO: 262 - DNA, 336 bp, artificial
  PM75A10-VL
gacgtcgtgatgactcagtctccactctccctgcccgtcacccttggagagccggcctccatctcctgcaggtctagtcaaagcctcgtatacagtaacggaaacacctacttgcattggtatcaacagaagccaggccaatctccaagactcctaatttataaggtttctaaccggttctctggggtcccagacagattcagcggcagtgggtcaggcactgatttcacactgaaaatcagcagggtggaggctgaggatgttggggtttatttctgttctcaaagtacacatgttccgtacacgtttggccaggggaccaagctggagatcaaa

SEQ ID NO: 263 - protein, 247 aa, artificial
  PM75A10-VH-VL
QVQLVQSGAEVKKPGASVKLSCKASGYTFTYFDINWVRQTPEQGLEWMGGISPGDGNTNYNENFKGRVTMTRDTSSSTAYMELSRLRSDDTAVYYCARDGNFPYYAMVNWGQGTTVTVSSGGGGSGGGGSGGGGSDVVMTQSPLSLPVTLGEPASISCRSSQSLVYSNGNTYLHWYQQKPGQSPRLLIYKVSNRFSGVPDRFSGSGSGTDFTLKISRVEAEDVGVYFCSQSTHVPYTFGQGTKLEIK

SEQ ID NO: 264 - DNA, 741 bp, artificial
  PM75A10-VH-VL
caggtgcagctggtccagtctggcgccgaagtgaagaagcctggcgcctccgtgaagctgtcctgcaaggcctccggctacaccttcacctacttcgacatcaactgggtgcggcagacgcctgagcagggcctggaatggatgggcggcatctcccctggcgacggcaacaccaactacaacgagaacttcaagggcagggtcacaatgaccagagacacgtcctcatccaccgcctacatggagctgtcccggctgagatctgacgacaccgccgtgtactactgcgccagggacggcaacttcccttactacgcgatggtcaactggggccagggcaccacggtcaccgtctcctcaggtggtggtggttctggcggcggcggctccggtggtggtggttctgacgtcgtgatgactcagtctccactctccctgcccgtcacccttggagagccggcctccatctcctgcaggtctagtcaaagcctcgtatacagtaacggaaacacctacttgcattggtatcaacagaagccaggccaatctccaagactcctaatttataaggtttctaaccggttctctggggtcccagacagattcagcggcagtgggtcaggcactgatttcacactgaaaatcagcagggtggaggctgaggatgttggggtttatttctgttctcaaagtacacatgttccgtacacgtttggccaggggaccaagctggagatcaaa

SEQ ID NO: 265 - protein, 502 aa, artificial
  PM75A10-Vh-VL x I2C VH-VL
QVQLVQSGAEVKKPGASVKLSCKASGYTFTYFDINWVRQTPEQGLEWMGGISPGDGNTNYNENFKGRVTMTRDTSSSTAYMELSRLRSDDTAVYYCARDGNFPYYAMVNWGQGTTVTVSSGGGGSGGGGSGGGGSDVVMTQSPLSLPVTLGEPASISCRSSQSLVYSNGNTYLHWYQQKPGQSPRLLIYKVSNRFSGVPDRFSGSGSGTDFTLKISRVEAEDVGVYFCSQSTHVPYTFGQGTKLEIKSGGGGSEVQLVESGGGLVQPGGSLKLSCAASGFTFNKYAMNWVRQAPGKGLEWVARIRSKYNNYATYYADSVKDRFTISRDDSKNTAYLQMNNLKTEDTAVYYCVRHGNFGNSYISYWAYWGQGTLVTVSSGGGGSGGGGSGGGGSQTVVTQEPSLTVSPGGTVTLTCGSSTGAVTSGNYPNWVQQKPGQAPRGLIGGTKFLAPGTPARFSGSLLGGKAALTLSGVQPEDEAEYYCVLWYSNRWVFGGGTKLTVL

SEQ ID NO: 266 - DNA, 1506 bp, artificial
  PM75A10-Vh-VL x I2C VH-VL
caggtgcagctggtccagtctggcgccgaagtgaagaagcctggcgcctccgtgaagctgtcctgcaaggcctccggctacaccttcacctacttcgacatcaactgggtgcggcagacgcctgagcagggcctggaatggatgggcggcatctcccctggcgacggcaacaccaactacaacgagaacttcaagggcagggtcacaatgaccagagacacgtcctcatccaccgcctacatggagctgtcccggctgagatctgacgacaccgccgtgtactactgcgccagggacggcaacttcccttactacgcgatggtcaactggggccagggcaccacggtcaccgtctcctcaggtggtggtggttctggcggcggcggctccggtggtggtggttctgacgtcgtgatgactcagtctccactctccctgcccgtcacccttggagagccggcctccatctcctgcaggtctagtcaaagcctcgtatacagtaacggaaacacctacttgcattggtatcaacagaagccaggccaatctccaagactcctaatttataaggtttctaaccggttctctggggtcccagacagattcagcggcagtgggtcaggcactgatttcacactgaaaatcagcagggtggaggctgaggatgttggggtttatttctgttctcaaagtacacatgttccgtacacgtttggccaggggaccaagctggagatcaaatccggaggtggtggatccgaggtgcagctggtcgagtctggaggaggattggtgcagcctggagggtcattgaaactctcatgtgcagcctctggattcaccttcaataagtacgccatgaactgggtccgccaggctccaggaaagggtttggaatgggttgctcgcataagaagtaaatataataattatgcaacatattatgccgattcagtgaaagacaggttcaccatctccagagatgattcaaaaaacactgcctatctacaaatgaacaacttgaaaactgaggacactgccgtgtactactgtgtgagacatgggaacttcggtaatagctacatatcctactgggcttactggggccaagggactctggtcaccgtctcctcaggtggtggtggttctggcggcggcggctccggtggtggtggttctcagactgttgtgactcaggaaccttcactcaccgtatcacctggtggaacagtcacactcacttgtggctcctcgactggggctgttacatctggcaactacccaaactgggtccaacaaaaaccaggtcaggcaccccgtggtctaataggtgggactaagttcctcgcccccggtactcctgccagattctcaggctccctgcttggaggcaaggctgccctcaccctctcaggggtacagccagaggatgaggcagaatattactgtgttctatggtacagcaaccgctgggtgttcggtggaggaaccaaactgactgtccta

SEQ ID NO: 267 - protein, 120 aa, artificial
  PM91B6-VH
QVQLVQSGAEVKKPGASVKLSCKASGYTFTYFDINWVRQTPEQGLEWMGGISPGDGNTNYNENFKGRVTMTRDTSSSTAYMELSRLRSDDTAVYYCARDGNFPYYALTNWGQGTTVTVSS

SEQ ID NO: 268 - protein, 5 aa, artificial
  PM91B6-HCDR1
YFDIN

SEQ ID NO: 269 - protein, 17 aa, artificial
  PM91B6-HCDR2
GISPGDGNTNYNENFKG

SEQ ID NO: 270 - protein, 11 aa, artificial
  PM91B6-HCDR3
DGNFPYYALTN

SEQ ID NO: 271 - DNA, 360 bp, artificial
  PM91B6-VH
caggtgcagctggtccagtctggcgccgaagtgaagaagcctggcgcctccgtgaagctgtcctgcaaggcctccggctacaccttcacctacttcgacatcaactgggtgcggcagacgcctgagcagggcctggaatggatgggcggcatctcccctggcgacggcaacaccaactacaacgagaacttcaagggcagggtcacaatgaccagagacacgtcctcatccaccgcctacatggagctgtcccggctgagatctgacgacaccgccgtgtactactgcgccagggacggcaacttcccttactacgccctgaccaactggggccagggcaccacggtcaccgtctcctca

SEQ ID NO: 272 - protein, 112 aa, artificial; identical to SEQ ID NO: 230
  PM91B6-VL

SEQ ID NO: 273 - protein, 16 aa, artificial
  PM91B6-LCDR1
RSSQSLVYSNGNTYLH

SEQ ID NO: 274 - protein, 7 aa, artificial
  PM91B6-LCDR2
KVSNRFS

SEQ ID NO: 275 - protein, 9 aa, artificial
  PM91B6-LCDR3
SQSTHVPYT

SEQ ID NO: 276 - DNA, 336 bp, artificial; identical to SEQ ID NO: 262
  PM91B6-VL

SEQ ID NO: 277 - protein, 247 aa, artificial
  PM91B6-VH-VL
QVQLVQSGAEVKKPGASVKLSCKASGYTFTYFDINWVRQTPEQGLEWMGGISPGDGNTNYNENFKGRVTMTRDTSSSTAYMELSRLRSDDTAVYYCARDGNFPYYALTNWGQGTTVTVSSGGGGSGGGGSGGGGSDVVMTQSPLSLPVTLGEPASISCRSSQSLVYSNGNTYLHWYQQKPGQSPRLLIYKVSNRFSGVPDRFSGSGSGTDFTLKISRVEAEDVGVYFCSQSTHVPYTFGQGTKLEIK

SEQ ID NO: 278 - DNA, 741 bp, artificial
  PM91B6-VH-VL
caggtgcagctggtccagtctggcgccgaagtgaagaagcctggcgcctccgtgaagctgtcctgcaaggcctccggctacaccttcacctacttcgacatcaactgggtgcggcagacgcctgagcagggcctggaatggatgggcggcatctcccctggcgacggcaacaccaactacaacgagaacttcaagggcagggtcacaatgaccagagacacgtcctcatccaccgcctacatggagctgtcccggctgagatctgacgacaccgccgtgtactactgcgccagggacggcaacttcccttactacgccctgaccaactggggccagggcaccacggtcaccgtctcctcaggtggtggtggttctggcggcggcggctccggtggtggtggttctgacgtcgtgatgactcagtctccactctccctgcccgtcacccttggagagccggcctccatctcctgcaggtctagtcaaagcctcgtatacagtaacggaaacacctacttgcattggtatcaacagaagccaggccaatctccaagactcctaatttataaggtttctaaccggttctctggggtcccagacagattcagcggcagtgggtcaggcactgatttcacactgaaaatcagcagggtggaggctgaggatgttggggtttatttctgttctcaaagtacacatgttccgtacacgtttggccaggggaccaagctggagatcaaa

SEQ ID NO: 279 - protein, 502 aa, artificial
  PM91B6-VH-VL x I2C VH-VL
QVQLVQSGAEVKKPGASVKLSCKASGYTFTYFDINWVRQTPEQGLEWMGGISPGDGNTNYNENFKGRVTMTRDTSSSTAYMELSRLRSDDTAVYYCARDGNFPYYALTNWGQGTTVTVSSGGGGSGGGGSGGGGSDVVMTQSPLSLPVTLGEPASISCRSSQSLVYSNGNTYLHWYQQKPGQSPRLLIYKVSNRFSGVPDRFSGSGSGTDFTLKISRVEAEDVGVYFCSQSTHVPYTFGQGTKLEIKSGGGGSEVQLVESGGGLVQPGGSLKLSCAASGFTFNKYAMNWVRQAPGKGLEWVARIRSKYNNYATYYADSVKDRFTISRDDSKNTAYLQMNNLKTEDTAVYYCVRHGNFGNSYISYWAYWGQGTLVTVSSGGGGSGGGGSGGGGSQTVVTQEPSLTVSPGGTVTLTCGSSTGAVTSGNYPNWVQQKPGQAPRGLIGGTKFLAPGTPARFSGSLLGGKAALTLSGVQPEDEAEYYCVLWYSNRWVFGGGTKLTVL

SEQ ID NO: 280 - DNA, 1506 bp, artificial
  PM91B6-VH-VL x I2C VH-VL
caggtgcagctggtccagtctggcgccgaagtgaagaagcctggcgcctccgtgaagctgtcctgcaaggcctccggctacaccttcacctacttcgacatcaactgggtgcggcagacgcctgagcagggcctggaatggatgggcggcatctcccctggcgacggcaacaccaactacaacgagaacttcaagggcagggtcacaatgaccagagacacgtcctcatccaccgcctacatggagctgtcccggctgagatctgacgacaccgccgtgtactactgcgccagggacggcaacttcccttactacgccctgaccaactggggccagggcaccacggtcaccgtctcctcaggtggtggtggttctggcggcggcggctccggtggtggtggttctgacgtcgtgatgactcagtctccactctccctgcccgtcacccttggagagccggcctccatctcctgcaggtctagtcaaagcctcgtatacagtaacggaaacacctacttgcattggtatcaacagaagccaggccaatctccaagactcctaatttataaggtttctaaccggttctctggggtcccagacagattcagcggcagtgggtcaggcactgatttcacactgaaaatcagcagggtggaggctgaggatgttggggtttatttctgttctcaaagtacacatgttccgtacacgtttggccaggggaccaagctggagatcaaatccggaggtggtggatccgaggtgcagctggtcgagtctggaggaggattggtgcagcctggagggtcattgaaactctcatgtgcagcctctggattcaccttcaataagtacgccatgaactgggtccgccaggctccaggaaagggtttggaatgggttgctcgcataagaagtaaatataataattatgcaacatattatgccgattcagtgaaagacaggttcaccatctccagagatgattcaaaaaacactgcctatctacaaatgaacaacttgaaaactgaggacactgccgtgtactactgtgtgagacatgggaacttcggtaatagctacatatcctactgggcttactggggccaagggactctggtcaccgtctcctcaggtggtggtggttctggcggcggcggctccggtggtggtggttctcagactgttgtgactcaggaaccttcactcaccgtatcacctggtggaacagtcacactcacttgtggctcctcgactggggctgttacatctggcaactacccaaactgggtccaacaaaaaccaggtcaggcaccccgtggtctaataggtgggactaagttcctcgcccccggtactcctgccagattctcaggctccctgcttggaggcaaggctgccctcaccctctcaggggtacagccagaggatgaggcagaatattactgtgttctatggtacagcaaccgctgggtgttcggtggaggaaccaaactgactgtccta

SEQ ID NO: 281 - protein, 121 aa, artificial
  PM83A12-VH
QVQLVESGGGLVKPGESLRLSCAASGFTFSDYYMYWVRQAPGKGLEWVAIISDGGYYTYYSDIIKGRFTISRDNAKNSLYLQTNSLKAEDTAVYYCARGFPLLRHGAFDLWGQGTLVTVSS

SEQ ID NO: 282 - protein, 5 aa, artificial
  PM83A12-HCDR1
DYYMY

SEQ ID NO: 283 - protein, 17 aa, artificial
  PM83A12-HCDR2
IISDGGYYTYYSDIIKG

SEQ ID NO: 284 - protein, 12 aa, artificial
  PM83A12-HCDR3
GFPLLRHGAFDL

SEQ ID NO: 285 - DNA, 363 bp, artificial
  PM83A12-VH
caggtgcagctggtcgagtctggcggcggactggtgaagcctggcgagtccctgaggctgtcctgtgccgcctccggcttcaccttctccgactactacatgtactgggtccgccaggcccctgggaaggggctggaatgggtggccatcatctccgacggcggctactacacctactactccgacatcatcaagggccggttcaccatctcccgggacaatgccaagaacagcctgtacctgcagacgaactccctgaaggccgaggacaccgccgtgtactactgcgcccggggcttccctctgctgagacacggcgccttcgacctctggggccagggcaccctggtcaccgtctcctca

SEQ ID NO: 286 - protein, 107 aa, artificial
  PM83A12-VL
DIQMTQSPSSLSASVGDRVTITCKASQNVDTNVAWYQQKPGQAPKSLIYSASYRYSDVPSRFSGSASGTDFTLTISSVQSEDFATYYCQQYDSYPYTFGGGTKLEIK

SEQ ID NO: 287 - protein, 11 aa, artificial
  PM83A12-LCDR1
KASQNVDTNVA

SEQ ID NO: 288 - protein, 7 aa, artificial
  PM83A12-LCDR2
SASYRYS

SEQ ID NO: 289 - protein, 9 aa, artificial
  PM83A12-LCDR3
QQYDSYPYT

SEQ ID NO: 290 - DNA, 321 bp, artificial
  PM83A12-VL
gacatccagatgacccagtcccccagctccctgtccgcctccgtgggcgacagagtgaccatcacctgcaaggcctcccagaacgtggacaccaacgtggcctggtatcagcagaagcccggccaggcccctaagtccctgatctactccgcctcctaccggtactctgacgtgccttcccggttctccggctccgcgtccggcaccgacttcaccctgaccatctccagcgtgcagtctgaggacttcgccacgtactactgccagcagtacgactcctacccttacaccttcggcggagggaccaagctggaaatcaag

SEQ ID NO: 291 - protein, 243 aa, artificial
  PM83A12-VH-VL
QVQLVESGGGLVKPGESLRLSCAASGFTFSDYYMYWVRQAPGKGLEWVAIISDGGYYTYYSDIIKGRFTISRDNAKNSLYLQTNSLKAEDTAVYYCARGFPLLRHGAFDLWGQGTLVTVSSGGGGSGGGGSGGGGSDIQMTQSPSSLSASVGDRVTITCKASQNVDTNVAWYQQKPGQAPKSLIYSASYRYSDVPSRFSGSASGTDFTLTISSVQSEDFATYYCQQYDSYPYTFGGGTKLEIK

SEQ ID NO: 292 - DNA, 729 bp, artificial
  PM83A12-VH-VL
caggtgcagctggtcgagtctggcggcggactggtgaagcctggcgagtccctgaggctgtcctgtgccgcctccggcttcaccttctccgactactacatgtactgggtccgccaggcccctgggaaggggctggaatgggtggccatcatctccgacggcggctactacacctactactccgacatcatcaagggccggttcaccatctcccgggacaatgccaagaacagcctgtacctgcagacgaactccctgaaggccgaggacaccgccgtgtactactgcgcccggggcttccctctgctgagacacggcgccttcgacctctggggccagggcaccctggtcaccgtctcctcaggtggtggtggttctggcggcggcggctccggtggtggtggttctgacatccagatgacccagtcccccagctccctgtccgcctccgtgggcgacagagtgaccatcacctgcaaggcctcccagaacgtggacaccaacgtggcctggtatcagcagaagcccggccaggcccctaagtccctgatctactccgcctcctaccggtactctgacgtgccttcccggttctccggctccgcgtccggcaccgacttcaccctgaccatctccagcgtgcagtctgaggacttcgccacgtactactgccagcagtacgactcctacccttacaccttcggcggagggaccaagctggaaatcaag

SEQ ID NO: 293 - protein, 498 aa, artificial
  PM83A12-VH-VL x I2C VH-VL
QVQLVESGGGLVKPGESLRLSCAASGFTFSDYYMYWVRQAPGKGLEWVAIISDGGYYTYYSDIIKGRFTISRDNAKNSLYLQTNSLKAEDTAVYYCARGFPLLRHGAFDLWGQGTLVTVSSGGGGSGGGGSGGGGSDIQMTQSPSSLSASVGDRVTITCKASQNVDTNVAWYQQKPGQAPKSLIYSASYRYSDVPSRFSGSASGTDFTLTISSVQSEDFATYYCQQYDSYPYTFGGGTKLEIKSGGGGSEVQLVESGGGLVQPGGSLKLSCAASGFTFNKYAMNWVRQAPGKGLEWVARIRSKYNNYATYYADSVKDRFTISRDDSKNTAYLQMNNLKTEDTAVYYCVRHGNFGNSYISYWAYWGQGTLVTVSSGGGGSGGGGSGGGGSQTVVTQEPSLTVSPGGTVTLTCGSSTGAVTSGNYPNWVQQKPGQAPRGLIGGTKFLAPGTPARFSGSLLGGKAALTLSGVQPEDEAEYYCVLWYSNRWVFGGGTKLTVL

SEQ ID NO: 294 - DNA, 1494 bp, artificial
  PM83A12-VH-VL x I2C VH-VL
caggtgcagctggtcgagtctggcggcggactggtgaagcctggcgagtccctgaggctgtcctgtgccgcctccggcttcaccttctccgactactacatgtactgggtccgccaggcccctgggaaggggctggaatgggtggccatcatctccgacggcggctactacacctactactccgacatcatcaagggccggttcaccatctcccgggacaatgccaagaacagcctgtacctgcagacgaactccctgaaggccgaggacaccgccgtgtactactgcgcccggggcttccctctgctgagacacggcgccttcgacctctggggccagggcaccctggtcaccgtctcctcaggtggtggtggttctggcggcggcggctccggtggtggtggttctgacatccagatgacccagtcccccagctccctgtccgcctccgtgggcgacagagtgaccatcacctgcaaggcctcccagaacgtggacaccaacgtggcctggtatcagcagaagcccggccaggcccctaagtccctgatctactccgcctcctaccggtactctgacgtgccttcccggttctccggctccgcgtccggcaccgacttcaccctgaccatctccagcgtgcagtctgaggacttcgccacgtactactgccagcagtacgactcctacccttacaccttcggcggagggaccaagctggaaatcaagtccggaggtggtggatccgaggtgcagctggtcgagtctggaggaggattggtgcagcctggagggtcattgaaactctcatgtgcagcctctggattcaccttcaataagtacgccatgaactgggtccgccaggctccaggaaagggtttggaatgggttgctcgcataagaagtaaatataataattatgcaacatattatgccgattcagtgaaagacaggttcaccatctccagagatgattcaaaaaacactgcctatctacaaatgaacaacttgaaaactgaggacactgccgtgtactactgtgtgagacatgggaacttcggtaatagctacatatcctactgggcttactggggccaagggactctggtcaccgtctcctcaggtggtggtggttctggcggcggcggctccggtggtggtggttctcagactgttgtgactcaggaaccttcactcaccgtatcacctggtggaacagtcacactcacttgtggctcctcgactggggctgttacatctggcaactacccaaactgggtccaacaaaaaccaggtcaggcaccccgtggtctaataggtgggactaagttcctcgcccccggtactcctgccagattctcaggctccctgcttggaggcaaggctgccctcaccctctcaggggtacagccagaggatgaggcagaatattactgtgttctatggtacagcaaccgctgggtgttcggtggaggaaccaaactgactgtccta

SEQ ID NO: 295 - protein, 121 aa, artificial
  PM07F8MPF-VH
QVQLVESGGGLVKPGESLRLSCAASGFTFSDYYMYWVRQAPGKGLEWVASISDGGSNTYYSDIIKGRFTISRDNAKNSLYLQTNSLKAEDTAVYYCARGFPLLRHGAFDLWGQGTLVTVSS

SEQ ID NO: 296 - protein, 5 aa, artificial
  PM07F8MPF-HCDR1
DYYMY

SEQ ID NO: 297 - protein, 17 aa, artificial
  PM07F8MPF-HCDR2
SISDGGSNTYYSDIIKG

SEQ ID NO: 298 - protein, 12 aa, artificial
  PM07F8MPF-HCDR3
GFPLLRHGAFDL

SEQ ID NO: 299 - DNA, 363 bp, artificial
  PM07F8MPF-VH
caggtgcagctggtcgagtctggcggcggactggtgaagcctggcgagtccctgaggctgtcctgtgccgcctccggcttcaccttctccgactactacatgtactgggtccgccaggcccctgggaagggactggaatgggtggcctccatctccgacggcggctccaacacctactactccgacatcatcaagggccggttcaccatctcccgggacaacgccaagaacagcctgtacctgcagacgaactccctgaaggccgaggacaccgccgtgtactactgcgcccggggcttccctctgctgagacacggcgccttcgacctctggggccagggcaccctggtcaccgtctcctca

SEQ ID NO: 300 - protein, 107 aa, artificial
  PM07F8MPF-VL
DIQMTQSPSSLSASVGDRVTITCRASQNVDTNVAWYQQKPGQAPKSLIYSATYRYSDVPSRFSGSASGTDFTLTISSVQSEDFATYYCQQYNSYPYTFGGGTKLEIK

SEQ ID NO: 301 - protein, 11 aa, artificial
  PM07F8MPF-LCDR1
RASQNVDTNVA

SEQ ID NO: 302 - protein, 17 aa, artificial
  PM07F8MPF-LCDR2
ARTIFICIALSATYRYS

SEQ ID NO: 303 - protein, 9 aa, artificial
  PM07F8MPF-LCDR3
QQYNSYPYT

SEQ ID NO: 304 - DNA, 321 bp, artificial
  PM07F8MPF-VL
gacatccagatgacccagtcccccagctccctgtccgcctccgtgggcgacagagtgaccatcacctgcagggcctcccagaacgtggacaccaacgtggcctggtatcagcagaagcccggccaggcccctaagtccctgatctactccgccacctaccggtactctgacgtgccttcccggttctccggctccgcgtccggcaccgacttcaccctgaccatctccagcgtgcagtctgaggacttcgccacgtactactgccagcagtacaactcctacccttacaccttcggcggagggaccaagctggaaatcaag

SEQ ID NO: 305 - protein, 243 aa, artificial
  PM07F8MPF-VH-VL
QVQLVESGGGLVKPGESLRLSCAASGFTFSDYYMYWVRQAPGKGLEWVASISDGGSNTYYSDIIKGRFTISRDNAKNSLYLQTNSLKAEDTAVYYCARGFPLLRHGAFDLWGQGTLVTVSSGGGGSGGGGSGGGGSDIQMTQSPSSLSASVGDRVTITCRASQNVDTNVAWYQQKPGQAPKSLIYSATYRYSDVPSRFSGSASGTDFTLTISSVQSEDFATYYCQQYNSYPYTFGGGTKLEIK

SEQ ID NO: 306 - DNA, 729 bp, artificial
  PM07F8MPF-VH-VL
caggtgcagctggtcgagtctggcggcggactggtgaagcctggcgagtccctgaggctgtcctgtgccgcctccggcttcaccttctccgactactacatgtactgggtccgccaggcccctgggaagggactggaatgggtggcctccatctccgacggcggctccaacacctactactccgacatcatcaagggccggttcaccatctcccgggacaacgccaagaacagcctgtacctgcagacgaactccctgaaggccgaggacaccgccgtgtactactgcgcccggggcttccctctgctgagacacggcgccttcgacctctggggccagggcaccctggtcaccgtctcctcaggtggtggtggttctggcggcggcggctccggtggtggtggttctgacatccagatgacccagtcccccagctccctgtccgcctccgtgggcgacagagtgaccatcacctgcagggcctcccagaacgtggacaccaacgtggcctggtatcagcagaagcccggccaggcccctaagtccctgatctactccgccacctaccggtactctgacgtgccttcccggttctccggctccgcgtccggcaccgacttcaccctgaccatctccagcgtgcagtctgaggacttcgccacgtactactgccagcagtacaactcctacccttacaccttcggcggagggaccaagctggaaatcaag

SEQ ID NO: 307 - protein, 498 aa, artificial
  PM07F8MPF-VH-VL x I2C VH-VL
QVQLVESGGGLVKPGESLRLSCAASGFTFSDYYMYWVRQAPGKGLEWVASISDGGSNTYYSDIIKGRFTISRDNAKNSLYLQTNSLKAEDTAVYYCARGFPLLRHGAFDLWGQGTLVTVSSGGGGSGGGGSGGGGSDIQMTQSPSSLSASVGDRVTITCRASQNVDTNVAWYQQKPGQAPKSLIYSATYRYSDVPSRFSGSASGTDFTLTISSVQSEDFATYYCQQYNSYPYTFGGGTKLEIKSGGGGSEVQLVESGGGLVQPGGSLKLSCAASGFTFNKYAMNWVRQAPGKGLEWVARIRSKYNNYATYYADSVKDRFTISRDDSKNTAYLQMNNLKTEDTAVYYCVRHGNFGNSYISYWAYWGQGTLVTVSSGGGGSGGGGSGGGGSQTVVTQEPSLTVSPGGTVTLTCGSSTGAVTSGNYPNWVQQKPGQAPRGLIGGTKFLAPGTPARFSGSLLGGKAALTLSGVQPEDEAEYYCVLWYSNRWVFGGGTKLTVL

SEQ ID NO: 308 - DNA, 1494 bp, artificial
  PM07F8MPF-VH-VL x I2C VH-VL
caggtgcagctggtcgagtctggcggcggactggtgaagcctggcgagtccctgaggctgtcctgtgccgcctccggcttcaccttctccgactactacatgtactgggtccgccaggcccctgggaagggactggaatgggtggcctccatctccgacggcggctccaacacctactactccgacatcatcaagggccggttcaccatctcccgggacaacgccaagaacagcctgtacctgcagacgaactccctgaaggccgaggacaccgccgtgtactactgcgcccggggcttccctctgctgagacacggcgccttcgacctctggggccagggcaccctggtcaccgtctcctcaggtggtggtggttctggcggcggcggctccggtggtggtggttctgacatccagatgacccagtcccccagctccctgtccgcctccgtgggcgacagagtgaccatcacctgcagggcctcccagaacgtggacaccaacgtggcctggtatcagcagaagcccggccaggcccctaagtccctgatctactccgccacctaccggtactctgacgtgccttcccggttctccggctccgcgtccggcaccgacttcaccctgaccatctccagcgtgcagtctgaggacttcgccacgtactactgccagcagtacaactcctacccttacaccttcggcggagggaccaagctggaaatcaagtccggaggtggtggatccgaggtgcagctggtcgagtctggaggaggattggtgcagcctggagggtcattgaaactctcatgtgcagcctctggattcaccttcaataagtacgccatgaactgggtccgccaggctccaggaaagggtttggaatgggttgctcgcataagaagtaaatataataattatgcaacatattatgccgattcagtgaaagacaggttcaccatctccagagatgattcaaaaaacactgcctatctacaaatgaacaacttgaaaactgaggacactgccgtgtactactgtgtgagacatgggaacttcggtaatagctacatatcctactgggcttactggggccaagggactctggtcaccgtctcctcaggtggtggtggttctggcggcggcggctccggtggtggtggttctcagactgttgtgactcaggaaccttcactcaccgtatcacctggtggaacagtcacactcacttgtggctcctcgactggggctgttacatctggcaactacccaaactgggtccaacaaaaaccaggtcaggcaccccgtggtctaataggtgggactaagttcctcgcccccggtactcctgccagattctcaggctccctgcttggaggcaaggctgccctcaccctctcaggggtacagccagaggatgaggcagaatattactgtgttctatggtacagcaaccgctgggtgttcggtggaggaaccaaactgactgtccta

SEQ ID NO: 309 - protein, 121 aa, artificial
  PM07F8L1-VH
QVQLVESGGGLVKPGESLRLSCAASGFTFSDYYMYWVRQAPGKGLEWVASISDGGSNTYYSDIIKGRFTISRDNAKNSLYLQMNSLKAEDTAVYYCARGFPLLRHGAFDYWGQGTLVTVSS

SEQ ID NO: 310 - protein, 5 aa, artificial
  PM07F8L1-HCDR1
DYYMS

SEQ ID NO: 311 - protein, 17 aa, artificial
  PM07F8L1-HCDR2
SISDGGSNTYYSDIIKG

SEQ ID NO: 312 - protein, 12 aa, artificial
  PM07F8L1-HCDR3
GFPLLRHGAFDY

SEQ ID NO: 313 - DNA, 363 bp, artificial
  PM07F8L1-VH
caggtgcagctggtcgagtctggcggcggactggtgaagcctggcgagtccctgaggctgtcctgtgccgcctccggcttcaccttctccgactactacatgtactgggtccgccaggcccctgggaaggggctggaatgggtggcctccatctccgacggcggctccaacacctactactccgacatcatcaagggccggttcaccatctcccgggacaacgccaagaacagcctgtacctgcagatgaactccctgaaggccgaggacaccgccgtgtactactgcgcccggggcttccctctgctgagacacggcgccttcgattactggggccagggcaccctggtcaccgtctcctca

SEQ ID NO: 314 - protein, 107 aa, artificial
  PM07F8L1-VL
DIQMTQSPSSLSASVGDRVTITCKASQNVDTNVAWYQQKPGQAPKSLIYSATYRYSDVPSRFSGSASGTDFTLTISSVQSEDFATYYCQQYNSYPYTFGGGTKLEIK

SEQ ID NO: 315 - protein, 11 aa, artificial
  PM07F8L1-LCDR1
KASQNVDTNVA

SEQ ID NO: 316 - protein, 7 aa, artificial
  PM07F8L1-LCDR2
SATYRYS

SEQ ID NO: 317 - protein, 9 aa, artificial
  PM07F8L1-LCDR3
QQYNSYPYT

SEQ ID NO: 318 - DNA, 321 bp, artificial
  PM07F8L1-VL
gacatccagatgacccagtcccccagctccctgtccgcctccgtgggcgacagagtgaccatcacctgcaaggcctcccagaacgtggacaccaacgtggcctggtatcagcagaagcccggccaggcccctaagtccctgatctactccgccacctaccggtactctgacgtgccttcccggttctccggctccgcgtccggcaccgacttcaccctgaccatctccagcgtgcagtctgaggacttcgccacgtactactgccagcagtacaactcctacccttacaccttcggcggagggaccaagctggaaatcaag

SEQ ID NO: 319 - protein, 243 aa, artificial
  PM07F8L1-VH-VL
QVQLVESGGGLVKPGESLRLSCAASGFTFSDYYMYWVRQAPGKGLEWVASISDGGSNTYYSDIIKGRFTISRDNAKNSLYLQMNSLKAEDTAVYYCARGFPLLRHGAFDYWGQGTLVTVSSGGGGSGGGGSGGGGSDIQMTQSPSSLSASVGDRVTITCKASQNVDTNVAWYQQKPGQAPKSLIYSATYRYSDVPSRFSGSASGTDFTLTISSVQSEDFATYYCQQYNSYPYTFGGGTKLEIK

SEQ ID NO: 320 - DNA, 729 bp, artificial
  PM07F8L1-VH-VL
caggtgcagctggtcgagtctggcggcggactggtgaagcctggcgagtccctgaggctgtcctgtgccgcctccggcttcaccttctccgactactacatgtactgggtccgccaggcccctgggaaggggctggaatgggtggcctccatctccgacggcggctccaacacctactactccgacatcatcaagggccggttcaccatctcccgggacaacgccaagaacagcctgtacctgcagatgaactccctgaaggccgaggacaccgccgtgtactactgcgcccggggcttccctctgctgagacacggcgccttcgattactggggccagggcaccctggtcaccgtctcctcaggtggtggtggttctggcggcggcggctccggtggtggtggttctgacatccagatgacccagtcccccagctccctgtccgcctccgtgggcgacagagtgaccatcacctgcaaggcctcccagaacgtggacaccaacgtggcctggtatcagcagaagcccggccaggcccctaagtccctgatctactccgccacctaccggtactctgacgtgccttcccggttctccggctccgcgtccggcaccgacttcaccctgaccatctccagcgtgcagtctgaggacttcgccacgtactactgccagcagtacaactcctacccttacaccttcggcggagggaccaagctggaaatcaag

SEQ ID NO: 321 - protein, 498 aa, artificial
  PM07F8L1-VH-VL x I2C VH-VL
QVQLVESGGGLVKPGESLRLSCAASGFTFSDYYMYWVRQAPGKGLEWVASISDGGSNTYYSDIIKGRFTISRDNAKNSLYLQMNSLKAEDTAVYYCARGFPLLRHGAFDYWGQGTLVTVSSGGGGSGGGGSGGGGSDIQMTQSPSSLSASVGDRVTITCKASQNVDTNVAWYQQKPGQAPKSLIYSATYRYSDVPSRFSGSASGTDFTLTISSVQSEDFATYYCQQYNSYPYTFGGGTKLEIKSGGGGSEVQLVESGGGLVQPGGSLKLSCAASGFTFNKYAMNWVRQAPGKGLEWVARIRSKYNNYATYYADSVKDRFTISRDDSKNTAYLQMNNLKTEDTAVYYCVRHGNFGNSYISYWAYWGQGTLVTVSSGGGGSGGGGSGGGGSQTVVTQEPSLTVSPGGTVTLTCGSSTGAVTSGNYPNWVQQKPGQAPRGLIGGTKFLAPGTPARFSGSLLGGKAALTLSGVQPEDEAEYYCVLWYSNRWVFGGGTKLTVL

SEQ ID NO: 322 - DNA, 1493 bp, artificial
  PM07F8L1-VH-VL x I2C VH-VL
caggtgcagctggtcgagtctggcggcggactggtgaagcctggcgagtccctgaggctgtcctgtgccgcctccggcttcaccttctccgactactacatgtactgggtccgccaggcccctgggaaggggctggaatgggtggcctccatctccgacggcggctccaacacctactactccgacatcatcaagggccggttcaccatctcccgggacaacgccaagaacagcctgtacctgcagatgaactccctgaaggccgaggacaccgccgtgtactactgcgcccggggcttccctctgctgagacacggcgccttcgattactggggccagggcaccctggtcaccgtctcctcaggtggtggtggttctggcggcggcggctccggtggtggtggttctgacatccagatgacccagtcccccagctccctgtccgcctccgtgggcgacagagtgaccatcacctgcaaggcctcccagaacgtggacaccaacgtggcctggtatcagcagaagcccggccaggcccctaagtccctgatctactccgccacctaccggtactctgacgtgccttcccggttctccggctccgcgtccggcaccgacttcaccctgaccatctccagcgtgcagtctgaggacttcgccacgtactactgccagcagtacaactcctacccttacaccttcggcggagggaccaagctggaaatcaagtccggaggtggtggatccgaggtgcagctggtcgagtctggaggaggattggtgcagcctggagggtcattgaaactctcatgtgcagcctctggattcaccttcaataagtacgccatgaactgggtccgccaggctccaggaaagggtttggaatgggttgctcgcataagaagtaaatataataattatgcaacatattatgccgattcagtgaaagacaggttcaccatctccagagatgattcaaaaaacactgcctatctacaaatgaacaacttgaaaactgaggacactgccgtgtactactgtgtgagacatgggaacttcggtaatagctacatatcctactgggcttactggggccaagggactctggtcaccgtctcctcaggtggtggtggttctggcggcggcggctccggtggtggtggttctcagactgttgtgactcaggaaccttcactcaccgtatcacctggtggaacagtcacactcacttgtggctcctcgactggggctgttacatctggcaactacccaaactgggtccaacaaaaaccaggtcaggcaccccgtggtctaataggtgggactaagttcctcgcccccggtactcctgccagattctcaggctccctgcttggaggcaaggctgccctcaccctctcaggggtacagccagaggatgaggcagaatattactgtgttctatggtacagcaaccgctgggtgttcggtggaggaaccaaactgactgtcct

SEQ ID NO: 323 - protein, 121 aa, artificial; identical to SEQ ID NO: 309
  PM07F8L2-VH

SEQ ID NO: 324 - protein, 5 aa, artificial
  PM07F8L2-HCDR1
DYYMS

SEQ ID NO: 325 - protein, 17 aa, artificial
  PM07F8L2-HCDR2
SISDGGSNTYYSDIIKG

SEQ ID NO: 326 - protein, 12 aa, artificial
  PM07F8L2-HCDR3
GFPLLRHGAFDY

SEQ ID NO: 327 - DNA, 363 bp, artificial; identical to SEQ ID NO: 313
  PM07F8L2-VH

SEQ ID NO: 328 - protein, 107 aa, artificial
  PM07F8L2-VL
DIQMTQSPSSLSASVGDRVTITCRASQNVDTNVAWYQQKPGQAPKSLIYSASYRYSDVPSRFSGSASGTDFTLTISSVQSEDFATYYCQQYNSYPYTFGGGTKLEIK

SEQ ID NO: 329 - protein, 11 aa, artificial
  PM07F8L2-LCDR1
RASQNVDTNVA

SEQ ID NO: 330 - protein, 7 aa, artificial
  PM07F8L2-LCDR2
SASYRYS

SEQ ID NO: 331 - protein, 9 aa, artificial
  PM07F8L2-LCDR3
QQYNSYPYT

SEQ ID NO: 332 - DNA, 321 bp, artificial
  PM07F8L2-VL
gacatccagatgacccagtcccccagctccctgtccgcctccgtgggcgacagagtgaccatcacctgcagggcctcccagaacgtggacaccaacgtggcctggtatcagcagaagcccggccaggcccctaagtccctgatctactccgcctcctaccggtactctgacgtgccttcccggttctccggctccgcgtccggcaccgacttcaccctgaccatctccagcgtgcagtctgaggacttcgccacgtactactgccagcagtacaactcctacccttacaccttcggcggagggaccaagctggaaatcaag

SEQ ID NO: 333 - protein, 243 aa, artificial
  PM07F8L2-VH-VL
QVQLVESGGGLVKPGESLRLSCAASGFTFSDYYMYWVRQAPGKGLEWVASISDGGSNTYYSDIIKGRFTISRDNAKNSLYLQMNSLKAEDTAVYYCARGFPLLRHGAFDYWGQGTLVTVSSGGGGSGGGGSGGGGSDIQMTQSPSSLSASVGDRVTITCRASQNVDTNVAWYQQKPGQAPKSLIYSASYRYSDVPSRFSGSASGTDFTLTISSVQSEDFATYYCQQYNSYPYTFGGGTKLEIK

SEQ ID NO: 334 - DNA, 729 bp, artificial
  PM07F8L2-VH-VL
caggtgcagctggtcgagtctggcggcggactggtgaagcctggcgagtccctgaggctgtcctgtgccgcctccggcttcaccttctccgactactacatgtactgggtccgccaggcccctgggaaggggctggaatgggtggcctccatctccgacggcggctccaacacctactactccgacatcatcaagggccggttcaccatctcccgggacaacgccaagaacagcctgtacctgcagatgaactccctgaaggccgaggacaccgccgtgtactactgcgcccggggcttccctctgctgagacacggcgccttcgattactggggccagggcaccctggtcaccgtctcctcaggtggtggtggttctggcggcggcggctccggtggtggtggttctgacatccagatgacccagtcccccagctccctgtccgcctccgtgggcgacagagtgaccatcacctgcagggcctcccagaacgtggacaccaacgtggcctggtatcagcagaagcccggccaggcccctaagtccctgatctactccgcctcctaccggtactctgacgtgccttcccggttctccggctccgcgtccggcaccgacttcaccctgaccatctccagcgtgcagtctgaggacttcgccacgtactactgccagcagtacaactcctacccttacaccttcggcggagggaccaagctggaaatcaag

SEQ ID NO: 335 - protein, 498 aa, artificial
  PM07F8L2-VH-VL x I2C VH-VL
QVQLVESGGGLVKPGESLRLSCAASGFTFSDYYMYWVRQAPGKGLEWVASISDGGSNTYYSDIIKGRFTISRDNAKNSLYLQMNSLKAEDTAVYYCARGFPLLRHGAFDYWGQGTLVTVSSGGGGSGGGGSGGGGSDIQMTQSPSSLSASVGDRVTITCRASQNVDTNVAWYQQKPGQAPKSLIYSASYRYSDVPSRFSGSASGTDFTLTISSVQSEDFATYYCQQYNSYPYTFGGGTKLEIKSGGGGSEVQLVESGGGLVQPGGSLKLSCAASGFTFNKYAMNWVRQAPGKGLEWVARIRSKYNNYATYYADSVKDRFTISRDDSKNTAYLQMNNLKTEDTAVYYCVRHGNFGNSYISYWAYWGQGTLVTVSSGGGGSGGGGSGGGGSQTVVTQEPSLTVSPGGTVTLTCGSSTGAVTSGNYPNWVQQKPGQAPRGLIGGTKFLAPGTPARFSGSLLGGKAALTLSGVQPEDEAEYYCVLWYSNRWVFGGGTKLTVL

SEQ ID NO: 336 - DNA, 1493 bp, artificial
  PM07F8L2-VH-VL x I2C VH-VL
caggtgcagctggtcgagtctggcggcggactggtgaagcctggcgagtccctgaggctgtcctgtgccgcctccggcttcaccttctccgactactacatgtactgggtccgccaggcccctgggaaggggctggaatgggtggcctccatctccgacggcggctccaacacctactactccgacatcatcaagggccggttcaccatctcccgggacaacgccaagaacagcctgtacctgcagatgaactccctgaaggccgaggacaccgccgtgtactactgcgcccggggcttccctctgctgagacacggcgccttcgattactggggccagggcaccctggtcaccgtctcctcaggtggtggtggttctggcggcggcggctccggtggtggtggttctgacatccagatgacccagtcccccagctccctgtccgcctccgtgggcgacagagtgaccatcacctgcagggcctcccagaacgtggacaccaacgtggcctggtatcagcagaagcccggccaggcccctaagtccctgatctactccgcctcctaccggtactctgacgtgccttcccggttctccggctccgcgtccggcaccgacttcaccctgaccatctccagcgtgcagtctgaggacttcgccacgtactactgccagcagtacaactcctacccttacaccttcggcggagggaccaagctggaaatcaagtccggaggtggtggatccgaggtgcagctggtcgagtctggaggaggattggtgcagcctggagggtcattgaaactctcatgtgcagcctctggattcaccttcaataagtacgccatgaactgggtccgccaggctccaggaaagggtttggaatgggttgctcgcataagaagtaaatataataattatgcaacatattatgccgattcagtgaaagacaggttcaccatctccagagatgattcaaaaaacactgcctatctacaaatgaacaacttgaaaactgaggacactgccgtgtactactgtgtgagacatgggaacttcggtaatagctacatatcctactgggcttactggggccaagggactctggtcaccgtctcctcaggtggtggtggttctggcggcggcggctccggtggtggtggttctcagactgttgtgactcaggaaccttcactcaccgtatcacctggtggaacagtcacactcacttgtggctcctcgactggggctgttacatctggcaactacccaaactgggtccaacaaaaaccaggtcaggcaccccgtggtctaataggtgggactaagttcctcgcccccggtactcctgccagattctcaggctccctgcttggaggcaaggctgccctcaccctctcaggggtacagccagaggatgaggcagaatattactgtgttctatggtacagcaaccgctgggtgttcggtggaggaaccaaactgactgtcct

SEQ ID NO: 337 - protein, 121 aa, artificial; identical to SEQ ID NO: 309
  PM07F8L3-VH

SEQ ID NO: 338 - protein, 5 aa, artificial
  PM07F8L3-HCDR1
DYYMS

SEQ ID NO: 339 - protein, 17 aa, artificial
  PM07F8L3-HCDR2
SISDGGSNTYYSDIIKG

SEQ ID NO: 340 - protein, 12 aa, artificial
  PM07F8L3-HCDR3
GFPLLRHGAFDY

SEQ ID NO: 341 - DNA, 363 bp, artificial; identical to SEQ ID NO: 313
  PM07F8L3-VH

SEQ ID NO: 342 - protein, 107 aa, artificial
  PM07F8L3-VL
DIQMTQSPSSLSASVGDRVTITCRASQNVDTNVAWYQQKPGQAPKSLIYSATYRYSDVPSRFSGSASGTDFTLTISSVQSEDFATYYCQQYDSYPYTFGGGTKLEIK

SEQ ID NO: 343 - protein, 11 aa, artificial
  PM07F8L3-LCDR1
RASQNVDTNVA

SEQ ID NO: 344 - protein, 7 aa, artificial
  PM07F8L3-LCDR2
SATYRYS

SEQ ID NO: 345 - protein, 9 aa, artificial
  PM07F8L3-LCDR3
QQYDSYPYT

SEQ ID NO: 346 - DNA, 321 bp, artificial
  PM07F8L3-VL
gacatccagatgacccagtcccccagctccctgtccgcctccgtgggcgacagagtgaccatcacctgcagggcctcccagaacgtggacaccaacgtggcctggtatcagcagaagcccggccaggcccctaagtccctgatctactccgccacctaccggtactctgacgtgccttcccggttctccggctccgcgtccggcaccgacttcaccctgaccatctccagcgtgcagtctgaggacttcgccacgtactactgccagcagtacgactcctacccttacaccttcggcggagggaccaagctggaaatcaag

SEQ ID NO: 347 - protein, 243 aa, artificial
  PM07F8L3-VH-VL
QVQLVESGGGLVKPGESLRLSCAASGFTFSDYYMYWVRQAPGKGLEWVASISDGGSNTYYSDIIKGRFTISRDNAKNSLYLQMNSLKAEDTAVYYCARGFPLLRHGAFDYWGQGTLVTVSSGGGGSGGGGSGGGGSDIQMTQSPSSLSASVGDRVTITCRASQNVDTNVAWYQQKPGQAPKSLIYSATYRYSDVPSRFSGSASGTDFTLTISSVQSEDFATYYCQQYDSYPYTFGGGTKLEIK

SEQ ID NO: 348 - DNA, 729 bp, artificial
  PM07F8L3-VH-VL
caggtgcagctggtcgagtctggcggcggactggtgaagcctggcgagtccctgaggctgtcctgtgccgcctccggcttcaccttctccgactactacatgtactgggtccgccaggcccctgggaaggggctggaatgggtggcctccatctccgacggcggctccaacacctactactccgacatcatcaagggccggttcaccatctcccgggacaacgccaagaacagcctgtacctgcagatgaactccctgaaggccgaggacaccgccgtgtactactgcgcccggggcttccctctgctgagacacggcgccttcgattactggggccagggcaccctggtcaccgtctcctcaggtggtggtggttctggcggcggcggctccggtggtggtggttctgacatccagatgacccagtcccccagctccctgtccgcctccgtgggcgacagagtgaccatcacctgcagggcctcccagaacgtggacaccaacgtggcctggtatcagcagaagcccggccaggcccctaagtccctgatctactccgccacctaccggtactctgacgtgccttcccggttctccggctccgcgtccggcaccgacttcaccctgaccatctccagcgtgcagtctgaggacttcgccacgtactactgccagcagtacgactcctacccttacaccttcggcggagggaccaagctggaaatcaag

SEQ ID NO: 349 - protein, 498 aa, artificial
  PM07F8L3-VH-VL x I2C VH-VL
QVQLVESGGGLVKPGESLRLSCAASGFTFSDYYMYWVRQAPGKGLEWVASISDGGSNTYYSDIIKGRFTISRDNAKNSLYLQMNSLKAEDTAVYYCARGFPLLRHGAFDYWGQGTLVTVSSGGGGSGGGGSGGGGSDIQMTQSPSSLSASVGDRVTITCRASQNVDTNVAWYQQKPGQAPKSLIYSATYRYSDVPSRFSGSASGTDFTLTISSVQSEDFATYYCQQYDSYPYTFGGGTKLEIKSGGGGSEVQLVESGGGLVQPGGSLKLSCAASGFTFNKYAMNWVRQAPGKGLEWVARIRSKYNNYATYYADSVKDRFTISRDDSKNTAYLQMNNLKTEDTAVYYCVRHGNFGNSYISYWAYWGQGTLVTVSSGGGGSGGGGSGGGGSQTVVTQEPSLTVSPGGTVTLTCGSSTGAVTSGNYPNWVQQKPGQAPRGLIGGTKFLAPGTPARFSGSLLGGKAALTLSGVQPEDEAEYYCVLWYSNRWVFGGGTKLTVL

SEQ ID NO: 350 - DNA, 1494 bp, artificial
  PM07F8L3-VH-VL x I2C VH-VL
caggtgcagctggtcgagtctggcggcggactggtgaagcctggcgagtccctgaggctgtcctgtgccgcctccggcttcaccttctccgactactacatgtactgggtccgccaggcccctgggaaggggctggaatgggtggcctccatctccgacggcggctccaacacctactactccgacatcatcaagggccggttcaccatctcccgggacaacgccaagaacagcctgtacctgcagatgaactccctgaaggccgaggacaccgccgtgtactactgcgcccggggcttccctctgctgagacacggcgccttcgattactggggccagggcaccctggtcaccgtctcctcaggtggtggtggttctggcggcggcggctccggtggtggtggttctgacatccagatgacccagtcccccagctccctgtccgcctccgtgggcgacagagtgaccatcacctgcagggcctcccagaacgtggacaccaacgtggcctggtatcagcagaagcccggccaggcccctaagtccctgatctactccgccacctaccggtactctgacgtgccttcccggttctccggctccgcgtccggcaccgacttcaccctgaccatctccagcgtgcagtctgaggacttcgccacgtactactgccagcagtacgactcctacccttacaccttcggcggagggaccaagctggaaatcaagtccggaggtggtggatccgaggtgcagctggtcgagtctggaggaggattggtgcagcctggagggtcattgaaactctcatgtgcagcctctggattcaccttcaataagtacgccatgaactgggtccgccaggctccaggaaagggtttggaatgggttgctcgcataagaagtaaatataataattatgcaacatattatgccgattcagtgaaagacaggttcaccatctccagagatgattcaaaaaacactgcctatctacaaatgaacaacttgaaaactgaggacactgccgtgtactactgtgtgagacatgggaacttcggtaatagctacatatcctactgggcttactggggccaagggactctggtcaccgtctcctcaggtggtggtggttctggcggcggcggctccggtggtggtggttctcagactgttgtgactcaggaaccttcactcaccgtatcacctggtggaacagtcacactcacttgtggctcctcgactggggctgttacatctggcaactacccaaactgggtccaacaaaaaccaggtcaggcaccccgtggtctaataggtgggactaagttcctcgcccccggtactcctgccagattctcaggctccctgcttggaggcaaggctgccctcaccctctcaggggtacagccagaggatgaggcagaatattactgtgttctatggtacagcaaccgctgggtgttcggtggaggaaccaaactgactgtccta

SEQ ID NO: 351 - protein, 121 aa, artificial
  PM07F8H3-VH
QVQLVESGGGLVKPGESLRLSCAASGFTFSDYYMYWVRQAPGKGLEWVASISDGGSNTYYSDIIKGRFTISRDNAKNSLYLQMNSLKAEDTAVYYCARGFPLLRHGAMDYWGQGTLVTVSS

SEQ ID NO: 352 - protein, 5 aa, artificial
  PM07F8H3-HCDR1
DYYMY

SEQ ID NO: 353 - protein, 17 aa, artificial
  PM07F8H3-HCDR2
SISDGGSNTYYSDIIKG

SEQ ID NO: 354 - protein, 12 aa, artificial
  PM07F8H3-HCDR3
GFPLLRHGAMDY

SEQ ID NO: 355 - DNA, 363 bp, artificial
  PM07F8H3-VH
caggtgcagctggtcgagtctggcggcggactggtgaagcctggcgagtccctgaggctgtcctgtgccgcctccggcttcaccttctccgactactacatgtactgggtccgccaggcccctgggaaggggctggaatgggtggcctccatctccgacggcggctccaacacctactactccgacatcatcaagggccggttcaccatctcccgggacaacgccaagaacagcctgtacctgcagatgaactccctgaaggccgaggacaccgccgtgtactactgcgcccggggcttccctctgctgagacacggcgccatggattactggggccagggcaccctggtcaccgtctcctca

SEQ ID NO: 356 - protein, 107 aa, artificial; identical to SEQ ID NO: 300
  PM07F8H3-VL

SEQ ID NO: 357 - protein, 11 aa, artificial
  PM07F8H3-LCDR1
RASQNVDTNVA

SEQ ID NO: 358 - protein, 7 aa, artificial
  PM07F8H3-LCDR1
SATYRYS

SEQ ID NO: 359 - protein, 9 aa, artificial
  PM07F8H3-LCDR1
QQYNSYPYT

SEQ ID NO: 360 - DNA, 321 bp, artificial; identical to SEQ ID NO: 304
  PM07F8H3-VL

SEQ ID NO: 361 - protein, 243 aa, artificial
  PM07F8H3-VH-VL
QVQLVESGGGLVKPGESLRLSCAASGFTFSDYYMYWVRQAPGKGLEWVASISDGGSNTYYSDIIKGRFTISRDNAKNSLYLQMNSLKAEDTAVYYCARGFPLLRHGAMDYWGQGTLVTVSSGGGGSGGGGSGGGGSDIQMTQSPSSLSASVGDRVTITCRASQNVDTNVAWYQQKPGQAPKSLIYSATYRYSDVPSRFSGSASGTDFTLTISSVQSEDFATYYCQQYNSYPYTFGGGTKLEIK

SEQ ID NO: 362 - DNA, 729 bp, artificial
  PM07F8H3-VH-VL
caggtgcagctggtcgagtctggcggcggactggtgaagcctggcgagtccctgaggctgtcctgtgccgcctccggcttcaccttctccgactactacatgtactgggtccgccaggcccctgggaaggggctggaatgggtggcctccatctccgacggcggctccaacacctactactccgacatcatcaagggccggttcaccatctcccgggacaacgccaagaacagcctgtacctgcagatgaactccctgaaggccgaggacaccgccgtgtactactgcgcccggggcttccctctgctgagacacggcgccatggattactggggccagggcaccctggtcaccgtctcctcaggtggtggtggttctggcggcggcggctccggtggtggtggttctgacatccagatgacccagtcccccagctccctgtccgcctccgtgggcgacagagtgaccatcacctgcagggcctcccagaacgtggacaccaacgtggcctggtatcagcagaagcccggccaggcccctaagtccctgatctactccgccacctaccggtactctgacgtgccttcccggttctccggctccgcgtccggcaccgacttcaccctgaccatctccagcgtgcagtctgaggacttcgccacgtactactgccagcagtacaactcctacccttacaccttcggcggagggaccaagctggaaatcaag

SEQ ID NO: 363 - protein, 498 aa, artificial
  PM07F8H3-VH-VL x I2C VH-VL
QVQLVESGGGLVKPGESLRLSCAASGFTFSDYYMYWVRQAPGKGLEWVASISDGGSNTYYSDIIKGRFTISRDNAKNSLYLQMNSLKAEDTAVYYCARGFPLLRHGAMDYWGQGTLVTVSSGGGGSGGGGSGGGGSDIQMTQSPSSLSASVGDRVTITCRASQNVDTNVAWYQQKPGQAPKSLIYSATYRYSDVPSRFSGSASGTDFTLTISSVQSEDFATYYCQQYNSYPYTFGGGTKLEIKSGGGGSEVQLVESGGGLVQPGGSLKLSCAASGFTFNKYAMNWVRQAPGKGLEWVARIRSKYNNYATYYADSVKDRFTISRDDSKNTAYLQMNNLKTEDTAVYYCVRHGNFGNSYISYWAYWGQGTLVTVSSGGGGSGGGGSGGGGSQTVVTQEPSLTVSPGGTVTLTCGSSTGAVTSGNYPNWVQQKPGQAPRGLIGGTKFLAPGTPARFSGSLLGGKAALTLSGVQPEDEAEYYCVLWYSNRWVFGGGTKLTVL

SEQ ID NO: 364 - DNA, 1493 bp, artificial
  PM07F8H3-VH-VL x I2C VH-VL
caggtgcagctggtcgagtctggcggcggactggtgaagcctggcgagtccctgaggctgtcctgtgccgcctccggcttcaccttctccgactactacatgtactgggtccgccaggcccctgggaaggggctggaatgggtggcctccatctccgacggcggctccaacacctactactccgacatcatcaagggccggttcaccatctcccgggacaacgccaagaacagcctgtacctgcagatgaactccctgaaggccgaggacaccgccgtgtactactgcgcccggggcttccctctgctgagacacggcgccatggattactggggccagggcaccctggtcaccgtctcctcaggtggtggtggttctggcggcggcggctccggtggtggtggttctgacatccagatgacccagtcccccagctccctgtccgcctccgtgggcgacagagtgaccatcacctgcagggcctcccagaacgtggacaccaacgtggcctggtatcagcagaagcccggccaggcccctaagtccctgatctactccgccacctaccggtactctgacgtgccttcccggttctccggctccgcgtccggcaccgacttcaccctgaccatctccagcgtgcagtctgaggacttcgccacgtactactgccagcagtacaactcctacccttacaccttcggcggagggaccaagctggaaatcaagtccggaggtggtggatccgaggtgcagctggtcgagtctggaggaggattggtgcagcctggagggtcattgaaactctcatgtgcagcctctggattcaccttcaataagtacgccatgaactgggtccgccaggctccaggaaagggtttggaatgggttgctcgcataagaagtaaatataataattatgcaacatattatgccgattcagtgaaagacaggttcaccatctccagagatgattcaaaaaacactgcctatctacaaatgaacaacttgaaaactgaggacactgccgtgtactactgtgtgagacatgggaacttcggtaatagctacatatcctactgggcttactggggccaagggactctggtcaccgtctcctcaggtggtggtggttctggcggcggcggctccggtggtggtggttctcagactgttgtgactcaggaaccttcactcaccgtatcacctggtggaacagtcacactcacttgtggctcctcgactggggctgttacatctggcaactacccaaactgggtccaacaaaaaccaggtcaggcaccccgtggtctaataggtgggactaagttcctcgcccccggtactcctgccagattctcaggctccctgcttggaggcaaggctgccctcaccctctcaggggtacagccagaggatgaggcagaatattactgtgttctatggtacagcaaccgctgggtgttcggtggaggaaccaaactgactgtcct

SEQ ID NO: 365 - protein, 121 aa, artificial
  PM07F8H2-VH
QVQLVESGGGLVKPGESLRLSCAASGFTFSDYYMYWVRQAPGKGLEWVAIISDGGYYTYYSDIIKGRFTISRDNAKNSLYLQMNSLKAEDTAVYYCARGFPLLRHGAFDYWGQGTLVTVSS

SEQ ID NO: 366 - protein, 5 aa, artificial
  PM07F8H2-HCDR1
DYYMY

SEQ ID NO: 367 - protein, 17 aa, artificial
  PM07F8H2-HCDR2
IISDGGYYTYYSDIIKG

SEQ ID NO: 368 - protein, 12 aa, artificial
  PM07F8H2-HCDR3
GFPLLRHGAFDY

SEQ ID NO: 369 - DNA, 363 bp, artificial
  PM07F8H2-VH
caggtgcagctggtcgagtctggcggcggactggtgaagcctggcgagtccctgaggctgtcctgtgccgcctccggcttcaccttctccgactactacatgtactgggtccgccaggcccctgggaaggggctggaatgggtggccatcatctccgacggcggctactacacctactactccgacatcatcaagggccggttcaccatctcccgggacaacgccaagaacagcctgtacctgcagatgaactccctgaaggccgaggacaccgccgtgtactactgcgcccggggcttccctctgctgagacacggcgccttcgattactggggccagggcaccctggtcaccgtctcctca

SEQ ID NO: 370 - protein, 107 aa, artificial; identical to SEQ ID NO: 300
  PM07F8H2-VL

SEQ ID NO: 371 - protein, 11 aa, artificial
  PM07F8H2-LCDR1
RASQNVDTNVA

SEQ ID NO: 372 - protein, 7 aa, artificial
  PM07F8H2-LCDR2
SATYRYS

SEQ ID NO: 373 - protein, 9 aa, artificial
  PM07F8H2-LCDR3
QQYNSYPYT

SEQ ID NO: 374 - DNA, 321 bp, artificial; identical to SEQ ID NO: 304
  PM07F8H2-VL

SEQ ID NO: 375 - protein, 243 aa, artificial
  PM07F8H2-VH-VL
QVQLVESGGGLVKPGESLRLSCAASGFTFSDYYMYWVRQAPGKGLEWVAIISDGGYYTYYSDIIKGRFTISRDNAKNSLYLQMNSLKAEDTAVYYCARGFPLLRHGAFDYWGQGTLVTVSSGGGGSGGGGSGGGGSDIQMTQSPSSLSASVGDRVTITCRASQNVDTNVAWYQQKPGQAPKSLIYSATYRYSDVPSRFSGSASGTDFTLTISSVQSEDFATYYCQQYNSYPYTFGGGTKLEIK

SEQ ID NO: 376 - DNA, 729 bp, artificial
  PM07F8H2-VH-VL
caggtgcagctggtcgagtctggcggcggactggtgaagcctggcgagtccctgaggctgtcctgtgccgcctccggcttcaccttctccgactactacatgtactgggtccgccaggcccctgggaaggggctggaatgggtggccatcatctccgacggcggctactacacctactactccgacatcatcaagggccggttcaccatctcccgggacaacgccaagaacagcctgtacctgcagatgaactccctgaaggccgaggacaccgccgtgtactactgcgcccggggcttccctctgctgagacacggcgccttcgattactggggccagggcaccctggtcaccgtctcctcaggtggtggtggttctggcggcggcggctccggtggtggtggttctgacatccagatgacccagtcccccagctccctgtccgcctccgtgggcgacagagtgaccatcacctgcagggcctcccagaacgtggacaccaacgtggcctggtatcagcagaagcccggccaggcccctaagtccctgatctactccgccacctaccggtactctgacgtgccttcccggttctccggctccgcgtccggcaccgacttcaccctgaccatctccagcgtgcagtctgaggacttcgccacgtactactgccagcagtacaactcctacccttacaccttcggcggagggaccaagctggaaatcaag

SEQ ID NO: 377 - protein, 498 aa, artificial
  PM07F8H2-VH-VL x I2C VH-VL
QVQLVESGGGLVKPGESLRLSCAASGFTFSDYYMYWVRQAPGKGLEWVAIISDGGYYTYYSDIIKGRFTISRDNAKNSLYLQMNSLKAEDTAVYYCARGFPLLRHGAFDYWGQGTLVTVSSGGGGSGGGGSGGGGSDIQMTQSPSSLSASVGDRVTITCRASQNVDTNVAWYQQKPGQAPKSLIYSATYRYSDVPSRFSGSASGTDFTLTISSVQSEDFATYYCQQYNSYPYTFGGGTKLEIKSGGGGSEVQLVESGGGLVQPGGSLKLSCAASGFTFNKYAMNWVRQAPGKGLEWVARIRSKYNNYATYYADSVKDRFTISRDDSKNTAYLQMNNLKTEDTAVYYCVRHGNFGNSYISYWAYWGQGTLVTVSSGGGGSGGGGSGGGGSQTVVTQEPSLTVSPGGTVTLTCGSSTGAVTSGNYPNWVQQKPGQAPRGLIGGTKFLAPGTPARFSGSLLGGKAALTLSGVQPEDEAEYYCVLWYSNRWVFGGGTKLTVL

SEQ ID NO: 378 - DNA, 1494 bp, artificial
  PM07F8H2-VH-VL x I2C VH-V
caggtgcagctggtcgagtctggcggcggactggtgaagcctggcgagtccctgaggctgtcctgtgccgcctccggcttcaccttctccgactactacatgtactgggtccgccaggcccctgggaaggggctggaatgggtggccatcatctccgacggcggctactacacctactactccgacatcatcaagggccggttcaccatctcccgggacaacgccaagaacagcctgtacctgcagatgaactccctgaaggccgaggacaccgccgtgtactactgcgcccggggcttccctctgctgagacacggcgccttcgattactggggccagggcaccctggtcaccgtctcctcaggtggtggtggttctggcggcggcggctccggtggtggtggttctgacatccagatgacccagtcccccagctccctgtccgcctccgtgggcgacagagtgaccatcacctgcagggcctcccagaacgtggacaccaacgtggcctggtatcagcagaagcccggccaggcccctaagtccctgatctactccgccacctaccggtactctgacgtgccttcccggttctccggctccgcgtccggcaccgacttcaccctgaccatctccagcgtgcagtctgaggacttcgccacgtactactgccagcagtacaactcctacccttacaccttcggcggagggaccaagctggaaatcaagtccggaggtggtggatccgaggtgcagctggtcgagtctggaggaggattggtgcagcctggagggtcattgaaactctcatgtgcagcctctggattcaccttcaataagtacgccatgaactgggtccgccaggctccaggaaagggtttggaatgggttgctcgcataagaagtaaatataataattatgcaacatattatgccgattcagtgaaagacaggttcaccatctccagagatgattcaaaaaacactgcctatctacaaatgaacaacttgaaaactgaggacactgccgtgtactactgtgtgagacatgggaacttcggtaatagctacatatcctactgggcttactggggccaagggactctggtcaccgtctcctcaggtggtggtggttctggcggcggcggctccggtggtggtggttctcagactgttgtgactcaggaaccttcactcaccgtatcacctggtggaacagtcacactcacttgtggctcctcgactggggctgttacatctggcaactacccaaactgggtccaacaaaaaccaggtcaggcaccccgtggtctaataggtgggactaagttcctcgcccccggtactcctgccagattctcaggctccctgcttggaggcaaggctgccctcaccctctcaggggtacagccagaggatgaggcagaatattactgtgttctatggtacagcaaccgctgggtgttcggtggaggaaccaaactgactgtccta

SEQ ID NO: 379 - protein, 118 aa, artificial
  PMH5A5-VH
QVQLVQSGAEVKKPGASVKVSCKASGYNFKDTYMDWVKQTPEQGLEWMGRIDPANGDSKYDPKFQGRVTITADTSTNTAYMELSSLRSEDTAVYYCARGGMIWYFDVWGQGTTVTVSS

SEQ ID NO: 380 - protein, 5 aa, artificial
  PMH5A5-HCDR1
DTYMD

SEQ ID NO: 381 - protein, 17 aa, artificial
  PMH5A5-HCDR2
RIDPANGDSKYDPKFQG

SEQ ID NO: 382 - protein, 9 aa, artificial
  PMH5A5-HCDR3
GGMIWYFDV

SEQ ID NO: 383 - DNA, 354 bp, artificial
  PMH5A5-VH
caggtgcagctggtccagtctggggcagaggttaagaagccaggggcctcagtcaaggtgtcctgcaaagcttctggctacaactttaaagacacctatatggactgggtgaagcagacgcctgaacagggcctggaatggatgggaaggattgatcctgcgaatggtgatagtaaatatgacccgaaattccagggcagggtcactataacagcagacacatccaccaacacagcctacatggagctcagcagcctgagatctgaggacactgccgtctattattgtgctagaggcgggatgatatggtacttcgatgtctggggccaagggaccacggtcaccgtctcctca

SEQ ID NO: 384 - protein, 108 aa, artificial
  PMH5A5-VL
EIVLTQSPATLSLSPGEKATLSCSASSSISSNYLHWYQQKPGLPPRLLIYRTSNLASGIPDRFSGSGSGTDYTLTISRLEPEDVATYYCQQGSSLPYTFGQGTKLEIK

SEQ ID NO: 385 - protein, 12 aa, artificial
  PMH5A5-LCDR1
SASSSISSNYLH

SEQ ID NO: 386 - protein, 7 aa, artificial
  PMH5A5-LCDR2
RTSNLAS

SEQ ID NO: 387 - protein, 9 aa, artificial
  PMH5A5-LCDR3
QQGSSLPYT

SEQ ID NO: 388 - DNA, 324 bp, artificial
  PMH5A5-VL
gagatcgtgctcacccagtctccagccaccctgtctctatctcccggggagaaggccactctctcctgcagtgccagctcaagtataagttccaattacttgcattggtatcagcagaagccaggattgccccctagactcttgatttataggacatccaatctggcttctggaatcccagatcgcttcagtggcagtgggtctgggaccgattacactctcacaattagcaggctggagcctgaagatgttgccacttactactgccagcagggtagtagtttaccgtacacgttcggacaagggaccaagcttgagatcaaa

SEQ ID NO: 389 - protein, 241 aa, artificial
  PMH5A5-VH-VL
QVQLVQSGAEVKKPGASVKVSCKASGYNFKDTYMDWVKQTPEQGLEWMGRIDPANGDSKYDPKFQGRVTITADTSTNTAYMELSSLRSEDTAVYYCARGGMIWYFDVWGQGTTVTVSSGGGGSGGGGSGGGGSEIVLTQSPATLSLSPGEKATLSCSASSSISSNYLHWYQQKPGLPPRLLIYRTSNLASGIPDRFSGSGSGTDYTLTISRLEPEDVATYYCQQGSSLPYTFGQGTKLEIK

SEQ ID NO: 390 - DNA, 723 bp, artificial
  PMH5A5-VH-VL
caggtgcagctggtccagtctggggcagaggttaagaagccaggggcctcagtcaaggtgtcctgcaaagcttctggctacaactttaaagacacctatatggactgggtgaagcagacgcctgaacagggcctggaatggatgggaaggattgatcctgcgaatggtgatagtaaatatgacccgaaattccagggcagggtcactataacagcagacacatccaccaacacagcctacatggagctcagcagcctgagatctgaggacactgccgtctattattgtgctagaggcgggatgatatggtacttcgatgtctggggccaagggaccacggtcaccgtctcctcaggtggtggtggttctggcggcggcggctccggtggtggtggttctgagatcgtgctcacccagtctccagccaccctgtctctatctcccggggagaaggccactctctcctgcagtgccagctcaagtataagttccaattacttgcattggtatcagcagaagccaggattgccccctagactcttgatttataggacatccaatctggcttctggaatcccagatcgcttcagtggcagtgggtctgggaccgattacactctcacaattagcaggctggagcctgaagatgttgccacttactactgccagcagggtagtagtttaccgtacacgttcggacaagggaccaagcttgagatcaaa

SEQ ID NO: 391 - protein, 497 aa, artificial
  PMH5A5-VH-VL x I2C VH-VL
QVQLVQSGAEVKKPGASVKVSCKASGYNFKDTYMDWVKQTPEQGLEWMGRIDPANGDSKYDPKFQGRVTITADTSTNTAYMELSSLRSEDTAVYYCARGGMIWYFDVWGQGTTVTVSSGGGGSGGGGSGGGGSEIVLTQSPATLSLSPGEKATLSCSASSSISSNYLHWYQQKPGLPPRLLIYRTSNLASGIPDRFSGSGSGTDYTLTISRLEPEDVATYYCQQGSSLPYTFGQGTKLEIKKSGGGGSEVQLVESGGGLVQPGGSLKLSCAASGFTFNKYAMNWVRQAPGKGLEWVARIRSKYNNYATYYADSVKDRFTISRDDSKNTAYLQMNNLKTEDTAVYYCVRHGNFGNSYISYWAYWGQGTLVTVSSGGGGSGGGGSGGGGSQTVVTQEPSLTVSPGGTVTLTCGSSTGAVTSGNYPNWVQQKPGQAPRGLIGGTKFLAPGTPARFSGSLLGGKAALTLSGVQPEDEAEYYCVLWYSNRWVFGGGTKLTVL

SEQ ID NO: 392 - DNA, 1488 bp, artificial
  PMH5A5-VH-VL x I2C VH-VL
caggtgcagctggtccagtctggggcagaggttaagaagccaggggcctcagtcaaggtgtcctgcaaagcttctggctacaactttaaagacacctatatggactgggtgaagcagacgcctgaacagggcctggaatggatgggaaggattgatcctgcgaatggtgatagtaaatatgacccgaaattccagggcagggtcactataacagcagacacatccaccaacacagcctacatggagctcagcagcctgagatctgaggacactgccgtctattattgtgctagaggcgggatgatatggtacttcgatgtctggggccaagggaccacggtcaccgtctcctcaggtggtggtggttctggcggcggcggctccggtggtggtggttctgagatcgtgctcacccagtctccagccaccctgtctctatctcccggggagaaggccactctctcctgcagtgccagctcaagtataagttccaattacttgcattggtatcagcagaagccaggattgccccctagactcttgatttataggacatccaatctggcttctggaatcccagatcgcttcagtggcagtgggtctgggaccgattacactctcacaattagcaggctggagcctgaagatgttgccacttactactgccagcagggtagtagtttaccgtacacgttcggacaagggaccaagcttgagatcaaatccggaggtggtggatccgaggtgcagctggtcgagtctggaggaggattggtgcagcctggagggtcattgaaactctcatgtgcagcctctggattcaccttcaataagtacgccatgaactgggtccgccaggctccaggaaagggtttggaatgggttgctcgcataagaagtaaatataataattatgcaacatattatgccgattcagtgaaagacaggttcaccatctccagagatgattcaaaaaacactgcctatctacaaatgaacaacttgaaaactgaggacactgccgtgtactactgtgtgagacatgggaacttcggtaatagctacatatcctactgggcttactggggccaagggactctggtcaccgtctcctcaggtggtggtggttctggcggcggcggctccggtggtggtggttctcagactgttgtgactcaggaaccttcactcaccgtatcacctggtggaacagtcacactcacttgtggctcctcgactggggctgttacatctggcaactacccaaactgggtccaacaaaaaccaggtcaggcaccccgtggtctaataggtgggactaagttcctcgcccccggtactcctgccagattctcaggctccctgcttggaggcaaggctgccctcaccctctcaggggtacagccagaggatgaggcagaatattactgtgttctatggtacagcaaccgctgggtgttcggtggaggaaccaaactgactgtccta

SEQ ID NO: 393 - protein, 118 aa, artificial
  PMH8A5-VH
QVQLVQSGAEVVKPGASVKLSCKASGFTITDTYMDWVRQAPGQGLEWIGRIDPANGDSKYDPKFQGRATITPDTSTNTVYMELSSLRSEDTAVYYCARGGMIWYFDVWGQGTTVTVSS

SEQ ID NO: 394 - protein, 5 aa, artificial
  PMH8A5-HCDR1
DTYMD

SEQ ID NO: 395 - protein, 17 aa, artificial
  PMH8A5-HCDR2
RIDPANGDSKYDPKFQG

SEQ ID NO: 396 - protein, 9 aa, artificial
  PMH8A5-HCDR3
GGMIWYFDV

SEQ ID NO: 397 - DNA, 354 bp, artificial
  PMH8A5-VH
caggtgcagctggtccagtctggggcagaggttgtgaagccaggggcctcagtcaagttgtcctgcaaagcttctggcttcaccattacagacacctatatggactgggtgaggcaggcgcctggacagggcctggaatggattggaaggattgatcctgcgaatggtgatagtaaatatgacccgaaattccagggcagggccactataacaccagacacatccaccaacacagtctacatggagctcagcagcctgagatctgaggacactgccgtctattattgtgctagaggcgggatgatatggtacttcgatgtctggggccaagggaccacggtcaccgtctcctca

SEQ ID NO: 398 - protein, 108 aa, artificial; identical to SEQ ID NO: 384
  PMH8A5-VL

SEQ ID NO: 399 - protein, 12 aa, artificial
  PMH8A5-LCDR1
SASSSISSNYLH

SEQ ID NO: 400 - protein, 7 aa, artificial
  PMH8A5-LCDR2
RTSNLAS

SEQ ID NO: 401 - protein, 9 aa, artificial
  PMH8A5-LCDR3
QQGSSLPYT

SEQ ID NO: 402 - DNA, 324 bp, artificial; identical to SEQ ID NO: 388
  PMH8A5-VL

SEQ ID NO: 403 - protein, 241 aa, artificial
  PMH8A5-VH-VL
QVQLVQSGAEVVKPGASVKLSCKASGFTITDTYMDWVRQAPGQGLEWIGRIDPANGDSKYDPKFQGRATITPDTSTNTVYMELSSLRSEDTAVYYCARGGMIWYFDVWGQGTTVTVSSGGGGSGGGGSGGGGSEIVLTQSPATLSLSPGEKATLSCSASSSISSNYLHWYQQKPGLPPRLLIYRTSNLASGIPDRFSGSGSGTDYTLTISRLEPEDVATYYCQQGSSLPYTFGQGTKLEIK

SEQ ID NO: 404 - DNA, 723 bp, artificial
  PMH8A5-VH-VL
caggtgcagctggtccagtctggggcagaggttgtgaagccaggggcctcagtcaagttgtcctgcaaagcttctggcttcaccattacagacacctatatggactgggtgaggcaggcgcctggacagggcctggaatggattggaaggattgatcctgcgaatggtgatagtaaatatgacccgaaattccagggcagggccactataacaccagacacatccaccaacacagtctacatggagctcagcagcctgagatctgaggacactgccgtctattattgtgctagaggcgggatgatatggtacttcgatgtctggggccaagggaccacggtcaccgtctcctcaggtggtggtggttctggcggcggcggctccggtggtggtggttctgagatcgtgctcacccagtctccagccaccctgtctctatctcccggggagaaggccactctctcctgcagtgccagctcaagtataagttccaattacttgcattggtatcagcagaagccaggattgccccctagactcttgatttataggacatccaatctggcttctggaatcccagatcgcttcagtggcagtgggtctgggaccgattacactctcacaattagcaggctggagcctgaagatgttgccacttactactgccagcagggtagtagtttaccgtacacgttcggacaagggaccaagcttgagatcaaa

SEQ ID NO: 405 - protein, 497 aa, artificial
  PMH8A5-VH-VL x I2C VH-VL
QVQLVQSGAEVVKPGASVKLSCKASGFTITDTYMDWVRQAPGQGLEWIGRIDPANGDSKYDPKFQGRATITPDTSTNTVYMELSSLRSEDTAVYYCARGGMIWYFDVWGQGTTVTVSSGGGGSGGGGSGGGGSEIVLTQSPATLSLSPGEKATLSCSASSSISSNYLHWYQQKPGLPPRLLIYRTSNLASGIPDRFSGSGSGTDYTLTISRLEPEDVATYYCQQGSSLPYTFGQGTKLEIKKSGGGGSEVQLVESGGGLVQPGGSLKLSCAASGFTFNKYAMNWVRQAPGKGLEWVARIRSKYNNYATYYADSVKDRFTISRDDSKNTAYLQMNNLKTEDTAVYYCVRHGNFGNSYISYWAYWGQGTLVTVSSGGGGSGGGGSGGGGSQTVVTQEPSLTVSPGGTVTLTCGSSTGAVTSGNYPNWVQQKPGQAPRGLIGGTKFLAPGTPARFSGSLLGGKAALTLSGVQPEDEAEYYCVLWYSNRWVFGGGTKLTVL

SEQ ID NO: 406 - DNA, 1487 bp, artificial
  PMH8A5-VH-VL x I2C VH-VL
caggtgcagctggtccagtctggggcagaggttgtgaagccaggggcctcagtcaagttgtcctgcaaagcttctggcttcaccattacagacacctatatggactgggtgaggcaggcgcctggacagggcctggaatggattggaaggattgatcctgcgaatggtgatagtaaatatgacccgaaattccagggcagggccactataacaccagacacatccaccaacacagtctacatggagctcagcagcctgagatctgaggacactgccgtctattattgtgctagaggcgggatgatatggtacttcgatgtctggggccaagggaccacggtcaccgtctcctcaggtggtggtggttctggcggcggcggctccggtggtggtggttctgagatcgtgctcacccagtctccagccaccctgtctctatctcccggggagaaggccactctctcctgcagtgccagctcaagtataagttccaattacttgcattggtatcagcagaagccaggattgccccctagactcttgatttataggacatccaatctggcttctggaatcccagatcgcttcagtggcagtgggtctgggaccgattacactctcacaattagcaggctggagcctgaagatgttgccacttactactgccagcagggtagtagtttaccgtacacgttcggacaagggaccaagcttgagatcaaatccggaggtggtggatccgaggtgcagctggtcgagtctggaggaggattggtgcagcctggagggtcattgaaactctcatgtgcagcctctggattcaccttcaataagtacgccatgaactgggtccgccaggctccaggaaagggtttggaatgggttgctcgcataagaagtaaatataataattatgcaacatattatgccgattcagtgaaagacaggttcaccatctccagagatgattcaaaaaacactgcctatctacaaatgaacaacttgaaaactgaggacactgccgtgtactactgtgtgagacatgggaacttcggtaatagctacatatcctactgggcttactggggccaagggactctggtcaccgtctcctcaggtggtggtggttctggcggcggcggctccggtggtggtggttctcagactgttgtgactcaggaaccttcactcaccgtatcacctggtggaacagtcacactcacttgtggctcctcgactggggctgttacatctggcaactacccaaactgggtccaacaaaaaccaggtcaggcaccccgtggtctaataggtgggactaagttcctcgcccccggtactcctgccagattctcaggctccctgcttggaggcaaggctgccctcaccctctcaggggtacagccagaggatgaggcagaatattactgtgttctatggtacagcaaccgctgggtgttcggtggaggaaccaaactgactgtcct

SEQ ID NO: 407 - protein, 118 aa, artificial; identical to SEQ ID NO: 379
  PMH5B1-VH

SEQ ID NO: 408 - protein, 5 aa, artificial
  PMH5B1-HCDR1
DTYMD

SEQ ID NO: 409 - protein, 17 aa, artificial
  PMH5B1-HCDR2
RIDPANGDSKYDPKFQG

SEQ ID NO: 410 - protein, 9 aa, artificial
  PMH5B1-HCDR3
GGMIWYFDV

SEQ ID NO: 411 - DNA, 354 bp, artificial; identical to SEQ ID NO: 383
  PMH5B1-VH

SEQ ID NO: 412 - protein, 108 aa, artificial
  PMH5B1-VL
EIVLTQSPATLSLSPGERATLSCSASSSISSNYLHWYQQKPGLPPRLLIYRTSNLASGIPDRFSGSGSGTDFTLTISRMEAEDFAVYYCQQGSSLPYTFGQGTKLEIK

SEQ ID NO: 413 - protein, 12 aa, artificial
  PMH5B1-LCDR1
SASSSISSNYLH

SEQ ID NO: 414 - protein, 7 aa, artificial
  PMH5B1-LCDR2
RTSNLAS

SEQ ID NO: 415 - protein, 9 aa, artificial
  PMH5B1-LCDR3
QQGSSLPYT

SEQ ID NO: 416 - DNA, 324 bp, artificial
  PMH5B1-VL
gagatcgtgctcacccagtctccagccaccctgtctctatctcccggggagagggccactctctcctgcagtgccagctcaagtataagttccaattacttgcattggtatcagcagaagccaggattgccccctagactcttgatttataggacatccaatctggcttctggaatcccagatcgcttcagtggcagtgggtctgggaccgatttcactctcacaattagcaggatggaggctgaagattttgccgtttactactgccagcagggtagtagtttaccgtacacgttcggacaagggaccaagcttgagatcaaa

SEQ ID NO: 417 - protein, 241 aa, artificial
  PMH5B1-VH-VL
QVQLVQSGAEVKKPGASVKVSCKASGYNFKDTYMDWVKQTPEQGLEWMGRIDPANGDSKYDPKFQGRVTITADTSTNTAYMELSSLRSEDTAVYYCARGGMIWYFDVWGQGTTVTVSSGGGGSGGGGSGGGGSEIVLTQSPATLSLSPGERATLSCSASSSISSNYLHWYQQKPGLPPRLLIYRTSNLASGIPDRFSGSGSGTDFTLTISRMEAEDFAVYYCQQGSSLPYTFGQGTKLEIK

SEQ ID NO: 418 - DNA, 723 bp, artificial
  PMH5B1-VH-VL
caggtgcagctggtccagtctggggcagaggttaagaagccaggggcctcagtcaaggtgtcctgcaaagcttctggctacaactttaaagacacctatatggactgggtgaagcagacgcctgaacagggcctggaatggatgggaaggattgatcctgcgaatggtgatagtaaatatgacccgaaattccagggcagggtcactataacagcagacacatccaccaacacagcctacatggagctcagcagcctgagatctgaggacactgccgtctattattgtgctagaggcgggatgatatggtacttcgatgtctggggccaagggaccacggtcaccgtctcctcaggtggtggtggttctggcggcggcggctccggtggtggtggttctgagatcgtgctcacccagtctccagccaccctgtctctatctcccggggagagggccactctctcctgcagtgccagctcaagtataagttccaattacttgcattggtatcagcagaagccaggattgccccctagactcttgatttataggacatccaatctggcttctggaatcccagatcgcttcagtggcagtgggtctgggaccgatttcactctcacaattagcaggatggaggctgaagattttgccgtttactactgccagcagggtagtagtttaccgtacacgttcggacaagggaccaagcttgagatcaaa

SEQ ID NO: 419 - protein, 496 aa, artificial
  PMH5B1-VL x I2C VH-VL
QVQLVQSGAEVKKPGASVKVSCKASGYNFKDTYMDWVKQTPEQGLEWMGRIDPANGDSKYDPKFQGRVTITADTSTNTAYMELSSLRSEDTAVYYCARGGMIWYFDVWGQGTTVTVSSGGGGSGGGGSGGGGSEIVLTQSPATLSLSPGERATLSCSASSSISSNYLHWYQQKPGLPPRLLIYRTSNLASGIPDRFSGSGSGTDFTLTISRMEAEDFAVYYCQQGSSLPYTFGQGTKLEIKSGGGGSEVQLVESGGGLVQPGGSLKLSCAASGFTFNKYAMNWVRQAPGKGLEWVARIRSKYNNYATYYADSVKDRFTISRDDSKNTAYLQMNNLKTEDTAVYYCVRHGNFGNSYISYWAYWGQGTLVTVSSGGGGSGGGGSGGGGSQTVVTQEPSLTVSPGGTVTLTCGSSTGAVTSGNYPNWVQQKPGQAPRGLIGGTKFLAPGTPARFSGSLLGGKAALTLSGVQPEDEAEYYCVLWYSNRWVFGGGTKLTVL

SEQ ID NO: 420 - DNA, 1487 bp, artificial
  PMH5B1-VL x I2C VH-VL
caggtgcagctggtccagtctggggcagaggttaagaagccaggggcctcagtcaaggtgtcctgcaaagcttctggctacaactttaaagacacctatatggactgggtgaagcagacgcctgaacagggcctggaatggatgggaaggattgatcctgcgaatggtgatagtaaatatgacccgaaattccagggcagggtcactataacagcagacacatccaccaacacagcctacatggagctcagcagcctgagatctgaggacactgccgtctattattgtgctagaggcgggatgatatggtacttcgatgtctggggccaagggaccacggtcaccgtctcctcaggtggtggtggttctggcggcggcggctccggtggtggtggttctgagatcgtgctcacccagtctccagccaccctgtctctatctcccggggagagggccactctctcctgcagtgccagctcaagtataagttccaattacttgcattggtatcagcagaagccaggattgccccctagactcttgatttataggacatccaatctggcttctggaatcccagatcgcttcagtggcagtgggtctgggaccgatttcactctcacaattagcaggatggaggctgaagattttgccgtttactactgccagcagggtagtagtttaccgtacacgttcggacaagggaccaagcttgagatcaaatccggaggtggtggatccgaggtgcagctggtcgagtctggaggaggattggtgcagcctggagggtcattgaaactctcatgtgcagcctctggattcaccttcaataagtacgccatgaactgggtccgccaggctccaggaaagggtttggaatgggttgctcgcataagaagtaaatataataattatgcaacatattatgccgattcagtgaaagacaggttcaccatctccagagatgattcaaaaaacactgcctatctacaaatgaacaacttgaaaactgaggacactgccgtgtactactgtgtgagacatgggaacttcggtaatagctacatatcctactgggcttactggggccaagggactctggtcaccgtctcctcaggtggtggtggttctggcggcggcggctccggtggtggtggttctcagactgttgtgactcaggaaccttcactcaccgtatcacctggtggaacagtcacactcacttgtggctcctcgactggggctgttacatctggcaactacccaaactgggtccaacaaaaaccaggtcaggcaccccgtggtctaataggtgggactaagttcctcgcccccggtactcctgccagattctcaggctccctgcttggaggcaaggctgccctcaccctctcaggggtacagccagaggatgaggcagaatattactgtgttctatggtacagcaaccgctgggtgttcggtggaggaaccaaactgactgtcct

SEQ ID NO: 421 - protein, 118 aa, artificial; identical to SEQ ID NO: 393
  PMH8B1-VH

SEQ ID NO: 422 - protein, 5 aa, artificial
  PMH8B1-HCDR1
DTYMD

SEQ ID NO: 423 - protein, 17 aa, artificial
  PMH8B1-HCDR2
RIDPANGDSKYDPKFQG

SEQ ID NO: 424 - protein, 9 aa, artificial
  PMH8B1-HCDR3
GGMIWYFDV

SEQ ID NO: 425 - DNA, 354 bp, artificial; identical to SEQ ID NO: 397
  PMH8B1-VH

SEQ ID NO: 426 - protein, 108 aa, artificial; identical to SEQ ID NO: 412
  PMH8B1-VL

SEQ ID NO: 427 - protein, 12 aa, artificial
  PMH8B1-LCDR1
SASSSISSNYLH

SEQ ID NO: 428 - protein, 7 aa, artificial
  PMH8B1-LCDR2
RTSNLAS

SEQ ID NO: 429 - protein, 9 aa, artificial
  PMH8B1-LCDR3
QQGSSLPYT

SEQ ID NO: 430 - DNA, 324 bp, artificial; identical to SEQ ID NO: 416
  PMH8B1-VL

SEQ ID NO: 431 - protein, 241 aa, artificial
  PMH8B1-VH-VL
QVQLVQSGAEVVKPGASVKLSCKASGFTITDTYMDWVRQAPGQGLEWIGRIDPANGDSKYDPKFQGRATITPDTSTNTVYMELSSLRSEDTAVYYCARGGMIWYFDVWGQGTTVTVSSGGGGSGGGGSGGGGSEIVLTQSPATLSLSPGERATLSCSASSSISSNYLHWYQQKPGLPPRLLIYRTSNLASGIPDRFSGSGSGTDFTLTISRMEAEDFAVYYCQQGSSLPYTFGQGTKLEIK

SEQ ID NO: 432 - DNA, 723 bp, artificial
  PMH8B1-VH-VL
caggtgcagctggtccagtctggggcagaggttgtgaagccaggggcctcagtcaagttgtcctgcaaagcttctggcttcaccattacagacacctatatggactgggtgaggcaggcgcctggacagggcctggaatggattggaaggattgatcctgcgaatggtgatagtaaatatgacccgaaattccagggcagggccactataacaccagacacatccaccaacacagtctacatggagctcagcagcctgagatctgaggacactgccgtctattattgtgctagaggcgggatgatatggtacttcgatgtctggggccaagggaccacggtcaccgtctcctcaggtggtggtggttctggcggcggcggctccggtggtggtggttctgagatcgtgctcacccagtctccagccaccctgtctctatctcccggggagagggccactctctcctgcagtgccagctcaagtataagttccaattacttgcattggtatcagcagaagccaggattgccccctagactcttgatttataggacatccaatctggcttctggaatcccagatcgcttcagtggcagtgggtctgggaccgatttcactctcacaattagcaggatggaggctgaagattttgccgtttactactgccagcagggtagtagtttaccgtacacgttcggacaagggaccaagcttgagatcaaa

SEQ ID NO: 433 - protein, 496 aa, artificial
  PMH8B1-VH-VL x I2C VH-VL
QVQLVQSGAEVVKPGASVKLSCKASGFTITDTYMDWVRQAPGQGLEWIGRIDPANGDSKYDPKFQGRATITPDTSTNTVYMELSSLRSEDTAVYYCARGGMIWYFDVWGQGTTVTVSSGGGGSGGGGSGGGGSEIVLTQSPATLSLSPGERATLSCSASSSISSNYLHWYQQKPGLPPRLLIYRTSNLASGIPDRFSGSGSGTDFTLTISRMEAEDFAVYYCQQGSSLPYTFGQGTKLEIKSGGGGSEVQLVESGGGLVQPGGSLKLSCAASGFTFNKYAMNWVRQAPGKGLEWVARIRSKYNNYATYYADSVKDRFTISRDDSKNTAYLQMNNLKTEDTAVYYCVRHGNFGNSYISYWAYWGQGTLVTVSSGGGGSGGGGSGGGGSQTVVTQEPSLTVSPGGTVTLTCGSSTGAVTSGNYPNWVQQKPGQAPRGLIGGTKFLAPGTPARFSGSLLGGKAALTLSGVQPEDEAEYYCVLWYSNRWVFGGGTKLTVL

SEQ ID NO: 434 - DNA, 1487 bp, artificial
  PMH8B1-VH-VL x I2C VH-VL
caggtgcagctggtccagtctggggcagaggttgtgaagccaggggcctcagtcaagttgtcctgcaaagcttctggcttcaccattacagacacctatatggactgggtgaggcaggcgcctggacagggcctggaatggattggaaggattgatcctgcgaatggtgatagtaaatatgacccgaaattccagggcagggccactataacaccagacacatccaccaacacagtctacatggagctcagcagcctgagatctgaggacactgccgtctattattgtgctagaggcgggatgatatggtacttcgatgtctggggccaagggaccacggtcaccgtctcctcaggtggtggtggttctggcggcggcggctccggtggtggtggttctgagatcgtgctcacccagtctccagccaccctgtctctatctcccggggagagggccactctctcctgcagtgccagctcaagtataagttccaattacttgcattggtatcagcagaagccaggattgccccctagactcttgatttataggacatccaatctggcttctggaatcccagatcgcttcagtggcagtgggtctgggaccgatttcactctcacaattagcaggatggaggctgaagattttgccgtttactactgccagcagggtagtagtttaccgtacacgttcggacaagggaccaagcttgagatcaaatccggaggtggtggatccgaggtgcagctggtcgagtctggaggaggattggtgcagcctggagggtcattgaaactctcatgtgcagcctctggattcaccttcaataagtacgccatgaactgggtccgccaggctccaggaaagggtttggaatgggttgctcgcataagaagtaaatataataattatgcaacatattatgccgattcagtgaaagacaggttcaccatctccagagatgattcaaaaaacactgcctatctacaaatgaacaacttgaaaactgaggacactgccgtgtactactgtgtgagacatgggaacttcggtaatagctacatatcctactgggcttactggggccaagggactctggtcaccgtctcctcaggtggtggtggttctggcggcggcggctccggtggtggtggttctcagactgttgtgactcaggaaccttcactcaccgtatcacctggtggaacagtcacactcacttgtggctcctcgactggggctgttacatctggcaactacccaaactgggtccaacaaaaaccaggtcaggcaccccgtggtctaataggtgggactaagttcctcgcccccggtactcctgccagattctcaggctccctgcttggaggcaaggctgccctcaccctctcaggggtacagccagaggatgaggcagaatattactgtgttctatggtacagcaaccgctgggtgttcggtggaggaaccaaactgactgtcct

SEQ ID NO: 435 - protein, 118 aa, artificial; identical to SEQ ID NO: 379
  PMH5B45-VH

SEQ ID NO: 436 - protein, 5 aa, artificial
  PMH5B45-HCDR1
DTYMD

SEQ ID NO: 437 - protein, 17 aa, artificial
  PMH5B45-HCDR2
RIDPANGDSKYDPKFQG

SEQ ID NO: 438 - protein, 9 aa, artificial
  PMH5B45-HCDR3
GGMIWYFDV

SEQ ID NO: 439 - DNA, 354 bp, artificial; identical to SEQ ID NO: 383
  PMH5B45-VH

SEQ ID NO: 440 - protein, 108 aa, artificial
  PMH5B45-VL
EIVLTQSPTTLALSPGERVTLSCSASSSISSNYLHWYQQKPGLPPRLLIYRTSNLASGIPDRFSGSGSGTDFTLTISRLEPEDVAVYYCQQGSSLPYTFGQGTKLEIK

SEQ ID NO: 441 - protein, 12 aa, artificial
  PMH5B45-LCDR1
SASSSISSNYLH

SEQ ID NO: 442 - protein, 7 aa, artificial
  PMH5B45-LCDR2
RTSNLAS

SEQ ID NO: 443 - protein, 9 aa, artificial
  PMH5B45-LCDR3
QQGSSLPYT

SEQ ID NO: 444 - DNA, 324 bp, artificial
  PMH5B45-VL
gagatcgtgctcacccagtctccaaccaccctggctctatctcccggggagagggtcactctctcctgcagtgccagctctagtataagttccaattacttgcattggtatcagcagaagccaggattgccccctagactcttgatttataggacatccaatctggcttctggaatcccagatcgcttcagtggcagtgggtctgggaccgatttcactctcacaattagcaggctggagcctgaagatgttgccgtttactactgccagcagggtagtagtttaccgtacacgttcggacaagggaccaagcttgagatcaaa

SEQ ID NO: 445 - protein, 241 aa, artificial
  PMH5B45-VH-VL
QVQLVQSGAEVKKPGASVKVSCKASGYNFKDTYMDWVKQTPEQGLEWMGRIDPANGDSKYDPKFQGRVTITADTSTNTAYMELSSLRSEDTAVYYCARGGMIWYFDVWGQGTTVTVSSGGGGSGGGGSGGGGSEIVLTQSPTTLALSPGERVTLSCSASSSISSNYLHWYQQKPGLPPRLLIYRTSNLASGIPDRFSGSGSGTDFTLTISRLEPEDVAVYYCQQGSSLPYTFGQGTKLEIK

SEQ ID NO: 446 - protein, 723 aa, artificial
  PMH5B45-VH-VL
CAGGTGCAGCTGGTCCAGTCTGGGGCAGAGGTTAAGAAGCCAGGGGCCTCAGTCAAGGTGTCCTGCAAAGCTTCTGGCTACAACTTTAAAGACACCTATATGGACTGGGTGAAGCAGACGCCTGAACAGGGCCTGGAATGGATGGGAAGGATTGATCCTGCGAATGGTGATAGTAAATATGACCCGAAATTCCAGGGCAGGGTCACTATAACAGCAGACACATCCACCAACACAGCCTACATGGAGCTCAGCAGCCTGAGATCTGAGGACACTGCCGTCTATTATTGTGCTAGAGGCGGGATGATATGGTACTTCGATGTCTGGGGCCAAGGGACCACGGTCACCGTCTCCTCAGGTGGTGGTGGTTCTGGCGGCGGCGGCTCCGGTGGTGGTGGTTCTGAGATCGTGCTCACCCAGTCTCCAACCACCCTGGCTCTATCTCCCGGGGAGAGGGTCACTCTCTCCTGCAGTGCCAGCTCTAGTATAAGTTCCAATTACTTGCATTGGTATCAGCAGAAGCCAGGATTGCCCCCTAGACTCTTGATTTATAGGACATCCAATCTGGCTTCTGGAATCCCAGATCGCTTCAGTGGCAGTGGGTCTGGGACCGATTTCACTCTCACAATTAGCAGGCTGGAGCCTGAAGATGTTGCCGTTTACTACTGCCAGCAGGGTAGTAGTTTACCGTACACGTTCGGACAAGGGACCAAGCTTGAGATCAAA

SEQ ID NO: 447 - protein, 496 aa, artificial
  PMH5B45-VH-VL x I2C VH-VL
QVQLVQSGAEVKKPGASVKVSCKASGYNFKDTYMDWVKQTPEQGLEWMGRIDPANGDSKYDPKFQGRVTITADTSTNTAYMELSSLRSEDTAVYYCARGGMIWYFDVWGQGTTVTVSSGGGGSGGGGSGGGGSEIVLTQSPTTLALSPGERVTLSCSASSSISSNYLHWYQQKPGLPPRLLIYRTSNLASGIPDRFSGSGSGTDFTLTISRLEPEDVAVYYCQQGSSLPYTFGQGTKLEIKSGGGGSEVQLVESGGGLVQPGGSLKLSCAASGFTFNKYAMNWVRQAPGKGLEWVARIRSKYNNYATYYADSVKDRFTISRDDSKNTAYLQMNNLKTEDTAVYYCVRHGNFGNSYISYWAYWGQGTLVTVSSGGGGSGGGGSGGGGSQTVVTQEPSLTVSPGGTVTLTCGSSTGAVTSGNYPNWVQQKPGQAPRGLIGGTKFLAPGTPARFSGSLLGGKAALTLSGVQPEDEAEYYCVLWYSNRWVFGGGTKLTVL

SEQ ID NO: 448 - DNA, 1488 bp, artificial
  PMH5B45-VH-VL x I2C VH-VL
caggtgcagctggtccagtctggggcagaggttaagaagccaggggcctcagtcaaggtgtcctgcaaagcttctggctacaactttaaagacacctatatggactgggtgaagcagacgcctgaacagggcctggaatggatgggaaggattgatcctgcgaatggtgatagtaaatatgacccgaaattccagggcagggtcactataacagcagacacatccaccaacacagcctacatggagctcagcagcctgagatctgaggacactgccgtctattattgtgctagaggcgggatgatatggtacttcgatgtctggggccaagggaccacggtcaccgtctcctcaggtggtggtggttctggcggcggcggctccggtggtggtggttctgagatcgtgctcacccagtctccaaccaccctggctctatctcccggggagagggtcactctctcctgcagtgccagctctagtataagttccaattacttgcattggtatcagcagaagccaggattgccccctagactcttgatttataggacatccaatctggcttctggaatcccagatcgcttcagtggcagtgggtctgggaccgatttcactctcacaattagcaggctggagcctgaagatgttgccgtttactactgccagcagggtagtagtttaccgtacacgttcggacaagggaccaagcttgagatcaaatccggaggtggtggatccgaggtgcagctggtcgagtctggaggaggattggtgcagcctggagggtcattgaaactctcatgtgcagcctctggattcaccttcaataagtacgccatgaactgggtccgccaggctccaggaaagggtttggaatgggttgctcgcataagaagtaaatataataattatgcaacatattatgccgattcagtgaaagacaggttcaccatctccagagatgattcaaaaaacactgcctatctacaaatgaacaacttgaaaactgaggacactgccgtgtactactgtgtgagacatgggaacttcggtaatagctacatatcctactgggcttactggggccaagggactctggtcaccgtctcctcaggtggtggtggttctggcggcggcggctccggtggtggtggttctcagactgttgtgactcaggaaccttcactcaccgtatcacctggtggaacagtcacactcacttgtggctcctcgactggggctgttacatctggcaactacccaaactgggtccaacaaaaaccaggtcaggcaccccgtggtctaataggtgggactaagttcctcgcccccggtactcctgccagattctcaggctccctgcttggaggcaaggctgccctcaccctctcaggggtacagccagaggatgaggcagaatattactgtgttctatggtacagcaaccgctgggtgttcggtggaggaaccaaactgactgtccta

SEQ ID NO: 449 - protein, 118 aa, artificial; identical to SEQ ID NO: 393
  PMH8B4-VH

SEQ ID NO: 450 - protein, 5 aa, artificial
  PMH8B4-HCDR1
DTYMD

SEQ ID NO: 451 - protein, 17 aa, artificial
  PMH8B4-HCDR2
RIDPANGDSKYDPKFQG

SEQ ID NO: 452 - protein, 9 aa, artificial
  PMH8B4-HCDR3
GGMIWYFDV

SEQ ID NO: 453 - DNA, 354 bp, artificial; identical to SEQ ID NO: 397
  PMH8B4-VH

SEQ ID NO: 454 - protein, 108 aa, artificial; identical to SEQ ID NO: 440
  PMH8B4-VL

SEQ ID NO: 455 - protein, 12 aa, artificial
  PMH8B4-LCDR1
SASSSISSNYLH

SEQ ID NO: 456 - protein, 7 aa, artificial
  PMH8B4-LCDR2
RTSNLAS

SEQ ID NO: 457 - protein, 9 aa, artificial
  PMH8B4-LCDR3
QQGSSLPYT

SEQ ID NO: 458 - DNA, 324 bp, artificial; identical to SEQ ID NO: 444
  PMH8B4-VL

SEQ ID NO: 459 - protein, 241 aa, artificial
  PMH8B4-VH-VL
QVQLVQSGAEVVKPGASVKLSCKASGFTITDTYMDWVRQAPGQGLEWIGRIDPANGDSKYDPKFQGRATITPDTSTNTVYMELSSLRSEDTAVYYCARGGMIWYFDVWGQGTTVTVSSGGGGSGGGGSGGGGSEIVLTQSPTTLALSPGERVTLSCSASSSISSNYLHWYQQKPGLPPRLLIYRTSNLASGIPDRFSGSGSGTDFTLTISRLEPEDVAVYYCQQGSSLPYTFGQGTKLEIK

SEQ ID NO: 460 - DNA, 723 bp, artificial
  PMH8B4-VH-VL
caggtgcagctggtccagtctggggcagaggttgtgaagccaggggcctcagtcaagttgtcctgcaaagcttctggcttcaccattacagacacctatatggactgggtgaggcaggcgcctggacagggcctggaatggattggaaggattgatcctgcgaatggtgatagtaaatatgacccgaaattccagggcagggccactataacaccagacacatccaccaacacagtctacatggagctcagcagcctgagatctgaggacactgccgtctattattgtgctagaggcgggatgatatggtacttcgatgtctggggccaagggaccacggtcaccgtctcctcaggtggtggtggttctggcggcggcggctccggtggtggtggttctgagatcgtgctcacccagtctccaaccaccctggctctatctcccggggagagggtcactctctcctgcagtgccagctctagtataagttccaattacttgcattggtatcagcagaagccaggattgccccctagactcttgatttataggacatccaatctggcttctggaatcccagatcgcttcagtggcagtgggtctgggaccgatttcactctcacaattagcaggctggagcctgaagatgttgccgtttactactgccagcagggtagtagtttaccgtacacgttcggacaagggaccaagcttgagatcaaa

SEQ ID NO: 461 - protein, 496 aa, artificial
  PMH8B4-VH-VL x I2C VH-VL
QVQLVQSGAEVVKPGASVKLSCKASGFTITDTYMDWVRQAPGQGLEWIGRIDPANGDSKYDPKFQGRATITPDTSTNTVYMELSSLRSEDTAVYYCARGGMIWYFDVWGQGTTVTVSSGGGGSGGGGSGGGGSEIVLTQSPTTLALSPGERVTLSCSASSSISSNYLHWYQQKPGLPPRLLIYRTSNLASGIPDRFSGSGSGTDFTLTISRLEPEDVAVYYCQQGSSLPYTFGQGTKLEIKSGGGGSEVQLVESGGGLVQPGGSLKLSCAASGFTFNKYAMNWVRQAPGKGLEWVARIRSKYNNYATYYADSVKDRFTISRDDSKNTAYLQMNNLKTEDTAVYYCVRHGNFGNSYISYWAYWGQGTLVTVSSGGGGSGGGGSGGGGSQTVVTQEPSLTVSPGGTVTLTCGSSTGAVTSGNYPNWVQQKPGQAPRGLIGGTKFLAPGTPARFSGSLLGGKAALTLSGVQPEDEAEYYCVLWYSNRWVFGGGTKLTVL

SEQ ID NO: 462 - DNA, 1488 bp, artificial
  PMH8B4-VH-VL x I2C VH-VL
caggtgcagctggtccagtctggggcagaggttgtgaagccaggggcctcagtcaagttgtcctgcaaagcttctggcttcaccattacagacacctatatggactgggtgaggcaggcgcctggacagggcctggaatggattggaaggattgatcctgcgaatggtgatagtaaatatgacccgaaattccagggcagggccactataacaccagacacatccaccaacacagtctacatggagctcagcagcctgagatctgaggacactgccgtctattattgtgctagaggcgggatgatatggtacttcgatgtctggggccaagggaccacggtcaccgtctcctcaggtggtggtggttctggcggcggcggctccggtggtggtggttctgagatcgtgctcacccagtctccaaccaccctggctctatctcccggggagagggtcactctctcctgcagtgccagctctagtataagttccaattacttgcattggtatcagcagaagccaggattgccccctagactcttgatttataggacatccaatctggcttctggaatcccagatcgcttcagtggcagtgggtctgggaccgatttcactctcacaattagcaggctggagcctgaagatgttgccgtttactactgccagcagggtagtagtttaccgtacacgttcggacaagggaccaagcttgagatcaaatccggaggtggtggatccgaggtgcagctggtcgagtctggaggaggattggtgcagcctggagggtcattgaaactctcatgtgcagcctctggattcaccttcaataagtacgccatgaactgggtccgccaggctccaggaaagggtttggaatgggttgctcgcataagaagtaaatataataattatgcaacatattatgccgattcagtgaaagacaggttcaccatctccagagatgattcaaaaaacactgcctatctacaaatgaacaacttgaaaactgaggacactgccgtgtactactgtgtgagacatgggaacttcggtaatagctacatatcctactgggcttactggggccaagggactctggtcaccgtctcctcaggtggtggtggttctggcggcggcggctccggtggtggtggttctcagactgttgtgactcaggaaccttcactcaccgtatcacctggtggaacagtcacactcacttgtggctcctcgactggggctgttacatctggcaactacccaaactgggtccaacaaaaaccaggtcaggcaccccgtggtctaataggtgggactaagttcctcgcccccggtactcctgccagattctcaggctccctgcttggaggcaaggctgccctcaccctctcaggggtacagccagaggatgaggcagaatattactgtgttctatggtacagcaaccgctgggtgttcggtggaggaaccaaactgactgtccta

SEQ ID NO: 463 - protein, 118 aa, artificial; identical to SEQ ID NO: 379
  PMH5C2-VH

SEQ ID NO: 464 - protein, 5 aa, artificial
  PMH5C2-HCDR1
DTYMD

SEQ ID NO: 465 - protein, 17 aa, artificial
  PMH5C2-HCDR2
RIDPANGDSKYDPKFQG

SEQ ID NO: 466 - protein, 9 aa, artificial
  PMH5C2-HCDR3
GGMIWYFDV

SEQ ID NO: 467 - DNA, 354 bp, artificial; identical to SEQ ID NO: 383
  PMH5C2-VH

SEQ ID NO: 468 - protein, 108 aa, artificial
  PMH5C2-VL
EIVLTQSPATLSVSPGERATLSCSASSSISSNYLHWYQQKPGLSPRLLIYRTSNLASGIPARFSGSGSGTAFTLTISRLEPEDFAVYYCQQGSSLPYTFGQGTKLEIK

SEQ ID NO: 469 - protein, 12 aa, artificial
  PMH5C2-LCDR1
SASSSISSNYLH

SEQ ID NO: 470 - protein, 7 aa, artificial
  PMH5C2-LCDR2
RTSNLAS

SEQ ID NO: 471 - protein, 9 aa, artificial
  PMH5C2-LCDR3
QQGSSLPYT

SEQ ID NO: 472 - DNA, 324 bp, artificial
  PMH5C2-VL
gagatcgtgctcacccagtctccagccaccctgtctgtatctcccggggagagggccactctctcctgcagtgccagctcaagtataagttccaattacttgcattggtatcagcagaagccaggattatcccctagactcttgatttataggacatccaatctggcttctggaatcccagctcgcttcagtggcagtgggtctgggaccgctttcactctcacaattagcaggctggagcctgaagattttgccgtttactactgccagcagggtagtagtttaccgtacacgttcggacaagggaccaagcttgagatcaaa

SEQ ID NO: 473 - protein, 241 aa, artificial
  PMH5C2-VH-VL
QVQLVQSGAEVKKPGASVKVSCKASGYNFKDTYMDWVKQTPEQGLEWMGRIDPANGDSKYDPKFQGRVTITADTSTNTAYMELSSLRSEDTAVYYCARGGMIWYFDVWGQGTTVTVSSGGGGSGGGGSGGGGSEIVLTQSPATLSVSPGERATLSCSASSSISSNYLHWYQQKPGLSPRLLIYRTSNLASGIPARFSGSGSGTAFTLTISRLEPEDFAVYYCQQGSSLPYTFGQGTKLEIK

SEQ ID NO: 474 - DNA, 723 bp, artificial
  PMH5C2-VH-VL
caggtgcagctggtccagtctggggcagaggttaagaagccaggggcctcagtcaaggtgtcctgcaaagcttctggctacaactttaaagacacctatatggactgggtgaagcagacgcctgaacagggcctggaatggatgggaaggattgatcctgcgaatggtgatagtaaatatgacccgaaattccagggcagggtcactataacagcagacacatccaccaacacagcctacatggagctcagcagcctgagatctgaggacactgccgtctattattgtgctagaggcgggatgatatggtacttcgatgtctggggccaagggaccacggtcaccgtctcctcaggtggtggtggttctggcggcggcggctccggtggtggtggttctgagatcgtgctcacccagtctccagccaccctgtctgtatctcccggggagagggccactctctcctgcagtgccagctcaagtataagttccaattacttgcattggtatcagcagaagccaggattatcccctagactcttgatttataggacatccaatctggcttctggaatcccagctcgcttcagtggcagtgggtctgggaccgctttcactctcacaattagcaggctggagcctgaagattttgccgtttactactgccagcagggtagtagtttaccgtacacgttcggacaagggaccaagcttgagatcaaa

SEQ ID NO: 475 - protein, 496 aa, artificial
  PMH5C2-VH-VL x I2C VH-VL
QVQLVQSGAEVKKPGASVKVSCKASGYNFKDTYMDWVKQTPEQGLEWMGRIDPANGDSKYDPKFQGRVTITADTSTNTAYMELSSLRSEDTAVYYCARGGMIWYFDVWGQGTTVTVSSGGGGSGGGGSGGGGSEIVLTQSPATLSVSPGERATLSCSASSSISSNYLHWYQQKPGLSPRLLIYRTSNLASGIPARFSGSGSGTAFTLTISRLEPEDFAVYYCQQGSSLPYTFGQGTKLEIKSGGGGSEVQLVESGGGLVQPGGSLKLSCAASGFTFNKYAMNWVRQAPGKGLEWVARIRSKYNNYATYYADSVKDRFTISRDDSKNTAYLQMNNLKTEDTAVYYCVRHGNFGNSYISYWAYWGQGTLVTVSSGGGGSGGGGSGGGGSQTVVTQEPSLTVSPGGTVTLTCGSSTGAVTSGNYPNWVQQKPGQAPRGLIGGTKFLAPGTPARFSGSLLGGKAALTLSGVQPEDEAEYYCVLWYSNRWVFGGGTKLTVL

SEQ ID NO: 476 - DNA, 1488 bp, artificial
  PMH5C2-VH-VL x I2C VH-VL
caggtgcagctggtccagtctggggcagaggttaagaagccaggggcctcagtcaaggtgtcctgcaaagcttctggctacaactttaaagacacctatatggactgggtgaagcagacgcctgaacagggcctggaatggatgggaaggattgatcctgcgaatggtgatagtaaatatgacccgaaattccagggcagggtcactataacagcagacacatccaccaacacagcctacatggagctcagcagcctgagatctgaggacactgccgtctattattgtgctagaggcgggatgatatggtacttcgatgtctggggccaagggaccacggtcaccgtctcctcaggtggtggtggttctggcggcggcggctccggtggtggtggttctgagatcgtgctcacccagtctccagccaccctgtctgtatctcccggggagagggccactctctcctgcagtgccagctcaagtataagttccaattacttgcattggtatcagcagaagccaggattatcccctagactcttgatttataggacatccaatctggcttctggaatcccagctcgcttcagtggcagtgggtctgggaccgctttcactctcacaattagcaggctggagcctgaagattttgccgtttactactgccagcagggtagtagtttaccgtacacgttcggacaagggaccaagcttgagatcaaatccggaggtggtggatccgaggtgcagctggtcgagtctggaggaggattggtgcagcctggagggtcattgaaactctcatgtgcagcctctggattcaccttcaataagtacgccatgaactgggtccgccaggctccaggaaagggtttggaatgggttgctcgcataagaagtaaatataataattatgcaacatattatgccgattcagtgaaagacaggttcaccatctccagagatgattcaaaaaacactgcctatctacaaatgaacaacttgaaaactgaggacactgccgtgtactactgtgtgagacatgggaacttcggtaatagctacatatcctactgggcttactggggccaagggactctggtcaccgtctcctcaggtggtggtggttctggcggcggcggctccggtggtggtggttctcagactgttgtgactcaggaaccttcactcaccgtatcacctggtggaacagtcacactcacttgtggctcctcgactggggctgttacatctggcaactacccaaactgggtccaacaaaaaccaggtcaggcaccccgtggtctaataggtgggactaagttcctcgcccccggtactcctgccagattctcaggctccctgcttggaggcaaggctgccctcaccctctcaggggtacagccagaggatgaggcagaatattactgtgttctatggtacagcaaccgctgggtgttcggtggaggaaccaaactgactgtccta

SEQ ID NO: 477 - protein, 118 aa, artificial; identical to SEQ ID NO: 393
  PMH8C2-VH

SEQ ID NO: 478 - protein, 5 aa, artificial
  PMH8C2-HCDR1
DTYMD

SEQ ID NO: 479 - protein, 17 aa, artificial
  PMH8C2-HCDR2
RIDPANGDSKYDPKFQG

SEQ ID NO: 480 - protein, 9 aa, artificial
  PMH8C2-HCDR3
GGMIWYFDV

SEQ ID NO: 481 - DNA, 354 bp, artificial; identical to SEQ ID NO: 397
  PMH8C2-VH

SEQ ID NO: 482 - protein, 108 aa, artificial; identical to SEQ ID NO: 468
  PMH8C2-VL

SEQ ID NO: 483 - protein, 12 aa, artificial
  PMH8C2-LCDR1
SASSSISSNYLH

SEQ ID NO: 484 - protein, 7 aa, artificial
  PMH8C2-LCDR2
RTSNLAS

SEQ ID NO: 485 - protein, 9 aa, artificial
  PMH8C2-LCDR3
QQGSSLPYT

SEQ ID NO: 486 - DNA, 324 bp, artificial; identical to SEQ ID NO: 472
  PMH8C2-VL

SEQ ID NO: 487 - protein, 241 aa, artificial
  PMH8C2-VH-VL
QVQLVQSGAEVVKPGASVKLSCKASGFTITDTYMDWVRQAPGQGLEWIGRIDPANGDSKYDPKFQGRATITPDTSTNTVYMELSSLRSEDTAVYYCARGGMIWYFDVWGQGTTVTVSSGGGGSGGGGSGGGGSEIVLTQSPATLSVSPGERATLSCSASSSISSNYLHWYQQKPGLSPRLLIYRTSNLASGIPARFSGSGSGTAFTLTISRLEPEDFAVYYCQQGSSLPYTFGQGTKLEIK

SEQ ID NO: 488 - DNA, 723 bp, artificial
  PMH8C2-VH-VL
caggtgcagctggtccagtctggggcagaggttgtgaagccaggggcctcagtcaagttgtcctgcaaagcttctggcttcaccattacagacacctatatggactgggtgaggcaggcgcctggacagggcctggaatggattggaaggattgatcctgcgaatggtgatagtaaatatgacccgaaattccagggcagggccactataacaccagacacatccaccaacacagtctacatggagctcagcagcctgagatctgaggacactgccgtctattattgtgctagaggcgggatgatatggtacttcgatgtctggggccaagggaccacggtcaccgtctcctcaggtggtggtggttctggcggcggcggctccggtggtggtggttctgagatcgtgctcacccagtctccagccaccctgtctgtatctcccggggagagggccactctctcctgcagtgccagctcaagtataagttccaattacttgcattggtatcagcagaagccaggattatcccctagactcttgatttataggacatccaatctggcttctggaatcccagctcgcttcagtggcagtgggtctgggaccgctttcactctcacaattagcaggctggagcctgaagattttgccgtttactactgccagcagggtagtagtttaccgtacacgttcggacaagggaccaagcttgagatcaaa

SEQ ID NO: 489 - protein, 496 aa, artificial
  PMH8C2-VH-VL x I2C VH-VL
QVQLVQSGAEVVKPGASVKLSCKASGFTITDTYMDWVRQAPGQGLEWIGRIDPANGDSKYDPKFQGRATITPDTSTNTVYMELSSLRSEDTAVYYCARGGMIWYFDVWGQGTTVTVSSGGGGSGGGGSGGGGSEIVLTQSPATLSVSPGERATLSCSASSSISSNYLHWYQQKPGLSPRLLIYRTSNLASGIPARFSGSGSGTAFTLTISRLEPEDFAVYYCQQGSSLPYTFGQGTKLEIKSGGGGSEVQLVESGGGLVQPGGSLKLSCAASGFTFNKYAMNWVRQAPGKGLEWVARIRSKYNNYATYYADSVKDRFTISRDDSKNTAYLQMNNLKTEDTAVYYCVRHGNFGNSYISYWAYWGQGTLVTVSSGGGGSGGGGSGGGGSQTVVTQEPSLTVSPGGTVTLTCGSSTGAVTSGNYPNWVQQKPGQAPRGLIGGTKFLAPGTPARFSGSLLGGKAALTLSGVQPEDEAEYYCVLWYSNRWVFGGGTKLTVL

SEQ ID NO: 490 - DNA, 1488 bp, artificial
  PMH8C2-VH-VL x I2C VH-VL
caggtgcagctggtccagtctggggcagaggttgtgaagccaggggcctcagtcaagttgtcctgcaaagcttctggcttcaccattacagacacctatatggactgggtgaggcaggcgcctggacagggcctggaatggattggaaggattgatcctgcgaatggtgatagtaaatatgacccgaaattccagggcagggccactataacaccagacacatccaccaacacagtctacatggagctcagcagcctgagatctgaggacactgccgtctattattgtgctagaggcgggatgatatggtacttcgatgtctggggccaagggaccacggtcaccgtctcctcaggtggtggtggttctggcggcggcggctccggtggtggtggttctgagatcgtgctcacccagtctccagccaccctgtctgtatctcccggggagagggccactctctcctgcagtgccagctcaagtataagttccaattacttgcattggtatcagcagaagccaggattatcccctagactcttgatttataggacatccaatctggcttctggaatcccagctcgcttcagtggcagtgggtctgggaccgctttcactctcacaattagcaggctggagcctgaagattttgccgtttactactgccagcagggtagtagtttaccgtacacgttcggacaagggaccaagcttgagatcaaatccggaggtggtggatccgaggtgcagctggtcgagtctggaggaggattggtgcagcctggagggtcattgaaactctcatgtgcagcctctggattcaccttcaataagtacgccatgaactgggtccgccaggctccaggaaagggtttggaatgggttgctcgcataagaagtaaatataataattatgcaacatattatgccgattcagtgaaagacaggttcaccatctccagagatgattcaaaaaacactgcctatctacaaatgaacaacttgaaaactgaggacactgccgtgtactactgtgtgagacatgggaacttcggtaatagctacatatcctactgggcttactggggccaagggactctggtcaccgtctcctcaggtggtggtggttctggcggcggcggctccggtggtggtggttctcagactgttgtgactcaggaaccttcactcaccgtatcacctggtggaacagtcacactcacttgtggctcctcgactggggctgttacatctggcaactacccaaactgggtccaacaaaaaccaggtcaggcaccccgtggtctaataggtgggactaagttcctcgcccccggtactcctgccagattctcaggctccctgcttggaggcaaggctgccctcaccctctcaggggtacagccagaggatgaggcagaatattactgtgttctatggtacagcaaccgctgggtgttcggtggaggaaccaaactgactgtccta

SEQ ID NO: 491 - protein, 118 aa, artificial; identical to SEQ ID NO: 379
  PMH5D1-VH

SEQ ID NO: 492 - protein, 5 aa, artificial
  PMH5D1-HCDR1
DTYMD

SEQ ID NO: 493 - protein, 17 aa, artificial
  PMH5D1-HCDR2
RIDPANGDSKYDPKFQG

SEQ ID NO: 494 - protein, 9 aa, artificial
  PMH5D1-HCDR3
GGMIWYFDV

SEQ ID NO: 495 - DNA, 354 bp, artificial; identical to SEQ ID NO: 383
  PMH5D1-VH

SEQ ID NO: 496 - protein, 108 aa, artificial
  PMH5D1-VL
EIVLTQSPATLSLSPGERATLSCSASSSISSNYLHWYQQKPGLPPRLLIYRTSNLASGIPARFSGSGSGTDFTLTISRLEPEDVAVYYCQQGSSLPYTFGQGTKLEIK

SEQ ID NO: 497 - protein, 12 aa, artificial
  PMH5D1-LCDR1
SASSSISSNYLH

SEQ ID NO: 498 - protein, 7 aa, artificial
  PMH5D1-LCDR2
RTSNLAS

SEQ ID NO: 499 - protein, 9 aa, artificial
  PMH5D1-LCDR3
QQGSSLPYT

SEQ ID NO: 500 - DNA, 324 bp, artificial
  PMH5D1-VL
gagatcgtgctcacccagtctccagccaccctgtctctatctcccggggagagggccactctctcctgcagtgccagctcaagtataagttccaattacttgcattggtatcagcagaagccaggattaccccctagactcttgatttataggacatccaatctggcttctggaatcccagctcgcttcagtggcagtgggtctgggaccgatttcactctcacaattagcaggctggagcctgaagatgttgccgtttactactgccagcagggtagtagtttaccgtacacgttcggacaagggaccaagcttgagatcaaa

SEQ ID NO: 501 - protein, 241 aa, artificial
  PMH5D1-VH-VL
QVQLVQSGAEVKKPGASVKVSCKASGYNFKDTYMDWVKQTPEQGLEWMGRIDPANGDSKYDPKFQGRVTITADTSTNTAYMELSSLRSEDTAVYYCARGGMIWYFDVWGQGTTVTVSSGGGGSGGGGSGGGGSEIVLTQSPATLSLSPGERATLSCSASSSISSNYLHWYQQKPGLPPRLLIYRTSNLASGIPARFSGSGSGTDFTLTISRLEPEDVAVYYCQQGSSLPYTFGQGTKLEIK

SEQ ID NO: 502 - DNA, 723 bp, artificial
  PMH5D1-VH-VL
caggtgcagctggtccagtctggggcagaggttaagaagccaggggcctcagtcaaggtgtcctgcaaagcttctggctacaactttaaagacacctatatggactgggtgaagcagacgcctgaacagggcctggaatggatgggaaggattgatcctgcgaatggtgatagtaaatatgacccgaaattccagggcagggtcactataacagcagacacatccaccaacacagcctacatggagctcagcagcctgagatctgaggacactgccgtctattattgtgctagaggcgggatgatatggtacttcgatgtctggggccaagggaccacggtcaccgtctcctcaggtggtggtggttctggcggcggcggctccggtggtggtggttctgagatcgtgctcacccagtctccagccaccctgtctctatctcccggggagagggccactctctcctgcagtgccagctcaagtataagttccaattacttgcattggtatcagcagaagccaggattaccccctagactcttgatttataggacatccaatctggcttctggaatcccagctcgcttcagtggcagtgggtctgggaccgatttcactctcacaattagcaggctggagcctgaagatgttgccgtttactactgccagcagggtagtagtttaccgtacacgttcggacaagggaccaagcttgagatcaaa

SEQ ID NO: 503 - protein, 496 aa, artificial
  PMH5D1-VH-VL x I2C VH-VL
QVQLVQSGAEVKKPGASVKVSCKASGYNFKDTYMDWVKQTPEQGLEWMGRIDPANGDSKYDPKFQGRVTITADTSTNTAYMELSSLRSEDTAVYYCARGGMIWYFDVWGQGTTVTVSSGGGGSGGGGSGGGGSEIVLTQSPATLSLSPGERATLSCSASSSISSNYLHWYQQKPGLPPRLLIYRTSNLASGIPARFSGSGSGTDFTLTISRLEPEDVAVYYCQQGSSLPYTFGQGTKLEIKSGGGGSEVQLVESGGGLVQPGGSLKLSCAASGFTFNKYAMNWVRQAPGKGLEWVARIRSKYNNYATYYADSVKDRFTISRDDSKNTAYLQMNNLKTEDTAVYYCVRHGNFGNSYISYWAYWGQGTLVTVSSGGGGSGGGGSGGGGSQTVVTQEPSLTVSPGGTVTLTCGSSTGAVTSGNYPNWVQQKPGQAPRGLIGGTKFLAPGTPARFSGSLLGGKAALTLSGVQPEDEAEYYCVLWYSNRWVFGGGTKLTVL

SEQ ID NO: 504 - DNA, 1488 bp, artificial
  PMH5D1-VH-VL x I2C VH-VL
caggtgcagctggtccagtctggggcagaggttaagaagccaggggcctcagtcaaggtgtcctgcaaagcttctggctacaactttaaagacacctatatggactgggtgaagcagacgcctgaacagggcctggaatggatgggaaggattgatcctgcgaatggtgatagtaaatatgacccgaaattccagggcagggtcactataacagcagacacatccaccaacacagcctacatggagctcagcagcctgagatctgaggacactgccgtctattattgtgctagaggcgggatgatatggtacttcgatgtctggggccaagggaccacggtcaccgtctcctcaggtggtggtggttctggcggcggcggctccggtggtggtggttctgagatcgtgctcacccagtctccagccaccctgtctctatctcccggggagagggccactctctcctgcagtgccagctcaagtataagttccaattacttgcattggtatcagcagaagccaggattaccccctagactcttgatttataggacatccaatctggcttctggaatcccagctcgcttcagtggcagtgggtctgggaccgatttcactctcacaattagcaggctggagcctgaagatgttgccgtttactactgccagcagggtagtagtttaccgtacacgttcggacaagggaccaagcttgagatcaaatccggaggtggtggatccgaggtgcagctggtcgagtctggaggaggattggtgcagcctggagggtcattgaaactctcatgtgcagcctctggattcaccttcaataagtacgccatgaactgggtccgccaggctccaggaaagggtttggaatgggttgctcgcataagaagtaaatataataattatgcaacatattatgccgattcagtgaaagacaggttcaccatctccagagatgattcaaaaaacactgcctatctacaaatgaacaacttgaaaactgaggacactgccgtgtactactgtgtgagacatgggaacttcggtaatagctacatatcctactgggcttactggggccaagggactctggtcaccgtctcctcaggtggtggtggttctggcggcggcggctccggtggtggtggttctcagactgttgtgactcaggaaccttcactcaccgtatcacctggtggaacagtcacactcacttgtggctcctcgactggggctgttacatctggcaactacccaaactgggtccaacaaaaaccaggtcaggcaccccgtggtctaataggtgggactaagttcctcgcccccggtactcctgccagattctcaggctccctgcttggaggcaaggctgccctcaccctctcaggggtacagccagaggatgaggcagaatattactgtgttctatggtacagcaaccgctgggtgttcggtggaggaaccaaactgactgtccta

SEQ ID NO: 505 - protein, 118 aa, artificial; identical to SEQ ID NO: 393
  PMH8D1-VH

SEQ ID NO: 506 - protein, 5 aa, artificial
  PMH8D1-HCDR1
DTYMD

SEQ ID NO: 507 - protein, 17 aa, artificial
  PMH8D1-HCDR2
RIDPANGDSKYDPKFQG

SEQ ID NO: 508 - protein, 9 aa, artificial
  PMH8D1-HCDR3
GGMIWYFDV

SEQ ID NO: 509 - DNA, 354 bp, artificial; identical to SEQ ID NO: 397
  PMH8D1-VH

SEQ ID NO: 510 - protein, 108 aa, artificial; identical to SEQ ID NO: 496
  PMH8D1-VL

SEQ ID NO: 511 - protein, 12 aa, artificial
  PMH8D1-LCDR1
SASSSISSNYLH

SEQ ID NO: 512 - protein, 7 aa, artificial
  PMH8D1-LCDR2
RTSNLAS

SEQ ID NO: 513 - protein, 9 aa, artificial
  PMH8D1-LCDR3
QQGSSLPYT

SEQ ID NO: 514 - DNA, 324 bp, artificial; identical to SEQ ID NO: 500
  PMH8D1-VL

SEQ ID NO: 515 - protein, 241 aa, artificial
  PMH8D1-VH-VL
QVQLVQSGAEVVKPGASVKLSCKASGFTITDTYMDWVRQAPGQGLEWIGRIDPANGDSKYDPKFQGRATITPDTSTNTVYMELSSLRSEDTAVYYCARGGMIWYFDVWGQGTTVTVSSGGGGSGGGGSGGGGSEIVLTQSPATLSLSPGERATLSCSASSSISSNYLHWYQQKPGLPPRLLIYRTSNLASGIPARFSGSGSGTDFTLTISRLEPEDVAVYYCQQGSSLPYTFGQGTKLEIK

SEQ ID NO: 516 - DNA, 723 bp, artificial
  PMH8D1-VH-VL
caggtgcagctggtccagtctggggcagaggttgtgaagccaggggcctcagtcaagttgtcctgcaaagcttctggcttcaccattacagacacctatatggactgggtgaggcaggcgcctggacagggcctggaatggattggaaggattgatcctgcgaatggtgatagtaaatatgacccgaaattccagggcagggccactataacaccagacacatccaccaacacagtctacatggagctcagcagcctgagatctgaggacactgccgtctattattgtgctagaggcgggatgatatggtacttcgatgtctggggccaagggaccacggtcaccgtctcctcaggtggtggtggttctggcggcggcggctccggtggtggtggttctgagatcgtgctcacccagtctccagccaccctgtctctatctcccggggagagggccactctctcctgcagtgccagctcaagtataagttccaattacttgcattggtatcagcagaagccaggattaccccctagactcttgatttataggacatccaatctggcttctggaatcccagctcgcttcagtggcagtgggtctgggaccgatttcactctcacaattagcaggctggagcctgaagatgttgccgtttactactgccagcagggtagtagtttaccgtacacgttcggacaagggaccaagcttgagatcaaa

SEQ ID NO: 517 - protein, 496 aa, artificial
  PMH8D1-VH-VL x I2C VH-VL
QVQLVQSGAEVVKPGASVKLSCKASGFTITDTYMDWVRQAPGQGLEWIGRIDPANGDSKYDPKFQGRATITPDTSTNTVYMELSSLRSEDTAVYYCARGGMIWYFDVWGQGTTVTVSSGGGGSGGGGSGGGGSEIVLTQSPATLSLSPGERATLSCSASSSISSNYLHWYQQKPGLPPRLLIYRTSNLASGIPARFSGSGSGTDFTLTISRLEPEDVAVYYCQQGSSLPYTFGQGTKLEIKSGGGGSEVQLVESGGGLVQPGGSLKLSCAASGFTFNKYAMNWVRQAPGKGLEWVARIRSKYNNYATYYADSVKDRFTISRDDSKNTAYLQMNNLKTEDTAVYYCVRHGNFGNSYISYWAYWGQGTLVTVSSGGGGSGGGGSGGGGSQTVVTQEPSLTVSPGGTVTLTCGSSTGAVTSGNYPNWVQQKPGQAPRGLIGGTKFLAPGTPARFSGSLLGGKAALTLSGVQPEDEAEYYCVLWYSNRWVFGGGTKLTVL

SEQ ID NO: 518 - DNA, 1488 bp, artificial
  PMH8D1-VH-VL x I2C VH-VL
caggtgcagctggtccagtctggggcagaggttgtgaagccaggggcctcagtcaagttgtcctgcaaagcttctggcttcaccattacagacacctatatggactgggtgaggcaggcgcctggacagggcctggaatggattggaaggattgatcctgcgaatggtgatagtaaatatgacccgaaattccagggcagggccactataacaccagacacatccaccaacacagtctacatggagctcagcagcctgagatctgaggacactgccgtctattattgtgctagaggcgggatgatatggtacttcgatgtctggggccaagggaccacggtcaccgtctcctcaggtggtggtggttctggcggcggcggctccggtggtggtggttctgagatcgtgctcacccagtctccagccaccctgtctctatctcccggggagagggccactctctcctgcagtgccagctcaagtataagttccaattacttgcattggtatcagcagaagccaggattaccccctagactcttgatttataggacatccaatctggcttctggaatcccagctcgcttcagtggcagtgggtctgggaccgatttcactctcacaattagcaggctggagcctgaagatgttgccgtttactactgccagcagggtagtagtttaccgtacacgttcggacaagggaccaagcttgagatcaaatccggaggtggtggatccgaggtgcagctggtcgagtctggaggaggattggtgcagcctggagggtcattgaaactctcatgtgcagcctctggattcaccttcaataagtacgccatgaactgggtccgccaggctccaggaaagggtttggaatgggttgctcgcataagaagtaaatataataattatgcaacatattatgccgattcagtgaaagacaggttcaccatctccagagatgattcaaaaaacactgcctatctacaaatgaacaacttgaaaactgaggacactgccgtgtactactgtgtgagacatgggaacttcggtaatagctacatatcctactgggcttactggggccaagggactctggtcaccgtctcctcaggtggtggtggttctggcggcggcggctccggtggtggtggttctcagactgttgtgactcaggaaccttcactcaccgtatcacctggtggaacagtcacactcacttgtggctcctcgactggggctgttacatctggcaactacccaaactgggtccaacaaaaaccaggtcaggcaccccgtggtctaataggtgggactaagttcctcgcccccggtactcctgccagattctcaggctccctgcttggaggcaaggctgccctcaccctctcaggggtacagccagaggatgaggcagaatattactgtgttctatggtacagcaaccgctgggtgttcggtggaggaaccaaactgactgtccta

SEQ ID NO: 519 - protein, 118 aa, artificial; identical to SEQ ID NO: 379
  PMH5E2-VH

SEQ ID NO: 520 - protein, 5 aa, artificial
  PMH5E2-HCDR1
DTYMD

SEQ ID NO: 521 - protein, 17 aa, artificial
  PMH5E2-HCDR2
RIDPANGDSKYDPKFQG

SEQ ID NO: 522 - protein, 9 aa, artificial
  PMH5E2-HCDR3
GGMIWYFDV

SEQ ID NO: 523 - DNA, 354 bp, artificial; identical to SEQ ID NO: 383
  PMH5E2-VH

SEQ ID NO: 524 - protein, 108 aa, artificial
  PMH5E2-VL
EIVLTQSPATMSVSPGERATLSCSASSSISSNYLHWYQQKPGLPPRLLIYRTSNLASGIPDRFSGSGSGTDFTLTISRLEAEDFATYYCQQGSSLPYTFGQGTKLEIK

SEQ ID NO: 525 - protein, 12 aa, artificial
  PMH5E2-LCDR1
SASSSISSNYLH

SEQ ID NO: 526 - protein, 7 aa, artificial
  PMH5E2-LCDR2
RTSNLAS

SEQ ID NO: 527 - protein, 9 aa, artificial
  PMH5E2-LCDR3
QQGSSLPYT

SEQ ID NO: 528 - DNA, 324 bp, artificial
  PMH5E2-VL
gagatcgtgctcacccagtctccagccaccatgtctgtatctcccggggagagggccactctctcctgcagtgccagctcaagtataagttccaattacttgcattggtatcagcagaagccaggattgccccctagactcttgatttataggacatccaatctggcttctggaatcccagatcgcttcagtggcagtgggtctgggaccgatttcactctcacaattagcaggctggaggctgaagattttgccacttactactgccagcagggtagtagtttaccgtacacgttcggacaagggaccaagcttgagatcaaa

SEQ ID NO: 529 - protein, 241 aa, artificial
  PMH5E2-VH-VL
QVQLVQSGAEVKKPGASVKVSCKASGYNFKDTYMDWVKQTPEQGLEWMGRIDPANGDSKYDPKFQGRVTITADTSTNTAYMELSSLRSEDTAVYYCARGGMIWYFDVWGQGTTVTVSSGGGGSGGGGSGGGGSEIVLTQSPATMSVSPGERATLSCSASSSISSNYLHWYQQKPGLPPRLLIYRTSNLASGIPDRFSGSGSGTDFTLTISRLEAEDFATYYCQQGSSLPYTFGQGTKLEIK

SEQ ID NO: 530 - DNA, 723 bp, artificial
  PMH5E2-VH-VL
caggtgcagctggtccagtctggggcagaggttaagaagccaggggcctcagtcaaggtgtcctgcaaagcttctggctacaactttaaagacacctatatggactgggtgaagcagacgcctgaacagggcctggaatggatgggaaggattgatcctgcgaatggtgatagtaaatatgacccgaaattccagggcagggtcactataacagcagacacatccaccaacacagcctacatggagctcagcagcctgagatctgaggacactgccgtctattattgtgctagaggcgggatgatatggtacttcgatgtctggggccaagggaccacggtcaccgtctcctcaggtggtggtggttctggcggcggcggctccggtggtggtggttctgagatcgtgctcacccagtctccagccaccatgtctgtatctcccggggagagggccactctctcctgcagtgccagctcaagtataagttccaattacttgcattggtatcagcagaagccaggattgccccctagactcttgatttataggacatccaatctggcttctggaatcccagatcgcttcagtggcagtgggtctgggaccgatttcactctcacaattagcaggctggaggctgaagattttgccacttactactgccagcagggtagtagtttaccgtacacgttcggacaagggaccaagcttgagatcaaa

SEQ ID NO: 531 - protein, 496 aa, artificial
  PMH5E2-VH-VL c I2C VH-VL
QVQLVQSGAEVKKPGASVKVSCKASGYNFKDTYMDWVKQTPEQGLEWMGRIDPANGDSKYDPKFQGRVTITADTSTNTAYMELSSLRSEDTAVYYCARGGMIWYFDVWGQGTTVTVSSGGGGSGGGGSGGGGSEIVLTQSPATMSVSPGERATLSCSASSSISSNYLHWYQQKPGLPPRLLIYRTSNLASGIPDRFSGSGSGTDFTLTISRLEAEDFATYYCQQGSSLPYTFGQGTKLEIKSGGGGSEVQLVESGGGLVQPGGSLKLSCAASGFTFNKYAMNWVRQAPGKGLEWVARIRSKYNNYATYYADSVKDRFTISRDDSKNTAYLQMNNLKTEDTAVYYCVRHGNFGNSYISYWAYWGQGTLVTVSSGGGGSGGGGSGGGGSQTVVTQEPSLTVSPGGTVTLTCGSSTGAVTSGNYPNWVQQKPGQAPRGLIGGTKFLAPGTPARFSGSLLGGKAALTLSGVQPEDEAEYYCVLWYSNRWVFGGGTKLTVL

SEQ ID NO: 532 - DNA, 1488 bp, artificial
  PMH5E2-VH-VL c I2C VH-VL
caggtgcagctggtccagtctggggcagaggttaagaagccaggggcctcagtcaaggtgtcctgcaaagcttctggctacaactttaaagacacctatatggactgggtgaagcagacgcctgaacagggcctggaatggatgggaaggattgatcctgcgaatggtgatagtaaatatgacccgaaattccagggcagggtcactataacagcagacacatccaccaacacagcctacatggagctcagcagcctgagatctgaggacactgccgtctattattgtgctagaggcgggatgatatggtacttcgatgtctggggccaagggaccacggtcaccgtctcctcaggtggtggtggttctggcggcggcggctccggtggtggtggttctgagatcgtgctcacccagtctccagccaccatgtctgtatctcccggggagagggccactctctcctgcagtgccagctcaagtataagttccaattacttgcattggtatcagcagaagccaggattgccccctagactcttgatttataggacatccaatctggcttctggaatcccagatcgcttcagtggcagtgggtctgggaccgatttcactctcacaattagcaggctggaggctgaagattttgccacttactactgccagcagggtagtagtttaccgtacacgttcggacaagggaccaagcttgagatcaaatccggaggtggtggatccgaggtgcagctggtcgagtctggaggaggattggtgcagcctggagggtcattgaaactctcatgtgcagcctctggattcaccttcaataagtacgccatgaactgggtccgccaggctccaggaaagggtttggaatgggttgctcgcataagaagtaaatataataattatgcaacatattatgccgattcagtgaaagacaggttcaccatctccagagatgattcaaaaaacactgcctatctacaaatgaacaacttgaaaactgaggacactgccgtgtactactgtgtgagacatgggaacttcggtaatagctacatatcctactgggcttactggggccaagggactctggtcaccgtctcctcaggtggtggtggttctggcggcggcggctccggtggtggtggttctcagactgttgtgactcaggaaccttcactcaccgtatcacctggtggaacagtcacactcacttgtggctcctcgactggggctgttacatctggcaactacccaaactgggtccaacaaaaaccaggtcaggcaccccgtggtctaataggtgggactaagttcctcgcccccggtactcctgccagattctcaggctccctgcttggaggcaaggctgccctcaccctctcaggggtacagccagaggatgaggcagaatattactgtgttctatggtacagcaaccgctgggtgttcggtggaggaaccaaactgactgtccta

SEQ ID NO: 533 - protein, 118 aa, artificial; identical to SEQ ID NO: 393
  PMH8E2-VH

SEQ ID NO: 534 - protein, 5 aa, artificial
  PMH8E2-HCDR1
DTYMD

SEQ ID NO: 535 - protein, 17 aa, artificial
  PMH8E2-HCDR2
RIDPANGDSKYDPKFQG

SEQ ID NO: 536 - protein, 9 aa, artificial
  PMH8E2-HCDR3
GGMIWYFDV

SEQ ID NO: 537 - DNA, 354 bp, artificial; identical to SEQ ID NO: 397
  PMH8E2-VH

SEQ ID NO: 538 - protein, 108 aa, artificial; identical to SEQ ID NO: 524
  PMH8E2-VL

SEQ ID NO: 539 - protein, 12 aa, artificial
  PMH8E2-LCDR1
SASSSISSNYLH

SEQ ID NO: 540 - protein, 7 aa, artificial
  PMH8E2-LCDR2
RTSNLAS

SEQ ID NO: 541 - protein, 9 aa, artificial
  PMH8E2-LCDR3
QQGSSLPYT

SEQ ID NO: 542 - DNA, 324 bp, artificial; identical to SEQ ID NO: 528
  PMH8E2-VL

SEQ ID NO: 543 - protein, 241 aa, artificial
  PMH8E2-VH-VL
QVQLVQSGAEVVKPGASVKLSCKASGFTITDTYMDWVRQAPGQGLEWIGRIDPANGDSKYDPKFQGRATITPDTSTNTVYMELSSLRSEDTAVYYCARGGMIWYFDVWGQGTTVTVSSGGGGSGGGGSGGGGSEIVLTQSPATMSVSPGERATLSCSASSSISSNYLHWYQQKPGLPPRLLIYRTSNLASGIPDRFSGSGSGTDFTLTISRLEAEDFATYYCQQGSSLPYTFGQGTKLEIK

SEQ ID NO: 544 - DNA, 723 bp, artificial
  PMH8E2-VH-VL
caggtgcagctggtccagtctggggcagaggttgtgaagccaggggcctcagtcaagttgtcctgcaaagcttctggcttcaccattacagacacctatatggactgggtgaggcaggcgcctggacagggcctggaatggattggaaggattgatcctgcgaatggtgatagtaaatatgacccgaaattccagggcagggccactataacaccagacacatccaccaacacagtctacatggagctcagcagcctgagatctgaggacactgccgtctattattgtgctagaggcgggatgatatggtacttcgatgtctggggccaagggaccacggtcaccgtctcctcaggtggtggtggttctggcggcggcggctccggtggtggtggttctgagatcgtgctcacccagtctccagccaccatgtctgtatctcccggggagagggccactctctcctgcagtgccagctcaagtataagttccaattacttgcattggtatcagcagaagccaggattgccccctagactcttgatttataggacatccaatctggcttctggaatcccagatcgcttcagtggcagtgggtctgggaccgatttcactctcacaattagcaggctggaggctgaagattttgccacttactactgccagcagggtagtagtttaccgtacacgttcggacaagggaccaagcttgagatcaaa

SEQ ID NO: 545 - protein, 496 aa, artificial
  PMH8E2-VH-VL x I2C VH-VL
QVQLVQSGAEVVKPGASVKLSCKASGFTITDTYMDWVRQAPGQGLEWIGRIDPANGDSKYDPKFQGRATITPDTSTNTVYMELSSLRSEDTAVYYCARGGMIWYFDVWGQGTTVTVSSGGGGSGGGGSGGGGSEIVLTQSPATMSVSPGERATLSCSASSSISSNYLHWYQQKPGLPPRLLIYRTSNLASGIPDRFSGSGSGTDFTLTISRLEAEDFATYYCQQGSSLPYTFGQGTKLEIKSGGGGSEVQLVESGGGLVQPGGSLKLSCAASGFTFNKYAMNWVRQAPGKGLEWVARIRSKYNNYATYYADSVKDRFTISRDDSKNTAYLQMNNLKTEDTAVYYCVRHGNFGNSYISYWAYWGQGTLVTVSSGGGGSGGGGSGGGGSQTVVTQEPSLTVSPGGTVTLTCGSSTGAVTSGNYPNWVQQKPGQAPRGLIGGTKFLAPGTPARFSGSLLGGKAALTLSGVQPEDEAEYYCVLWYSNRWVFGGGTKLTVL

SEQ ID NO: 546 - DNA, 1488 bp, artificial
  PMH8E2-VH-VL x I2C VH-VL
caggtgcagctggtccagtctggggcagaggttgtgaagccaggggcctcagtcaagttgtcctgcaaagcttctggcttcaccattacagacacctatatggactgggtgaggcaggcgcctggacagggcctggaatggattggaaggattgatcctgcgaatggtgatagtaaatatgacccgaaattccagggcagggccactataacaccagacacatccaccaacacagtctacatggagctcagcagcctgagatctgaggacactgccgtctattattgtgctagaggcgggatgatatggtacttcgatgtctggggccaagggaccacggtcaccgtctcctcaggtggtggtggttctggcggcggcggctccggtggtggtggttctgagatcgtgctcacccagtctccagccaccatgtctgtatctcccggggagagggccactctctcctgcagtgccagctcaagtataagttccaattacttgcattggtatcagcagaagccaggattgccccctagactcttgatttataggacatccaatctggcttctggaatcccagatcgcttcagtggcagtgggtctgggaccgatttcactctcacaattagcaggctggaggctgaagattttgccacttactactgccagcagggtagtagtttaccgtacacgttcggacaagggaccaagcttgagatcaaatccggaggtggtggatccgaggtgcagctggtcgagtctggaggaggattggtgcagcctggagggtcattgaaactctcatgtgcagcctctggattcaccttcaataagtacgccatgaactgggtccgccaggctccaggaaagggtttggaatgggttgctcgcataagaagtaaatataataattatgcaacatattatgccgattcagtgaaagacaggttcaccatctccagagatgattcaaaaaacactgcctatctacaaatgaacaacttgaaaactgaggacactgccgtgtactactgtgtgagacatgggaacttcggtaatagctacatatcctactgggcttactggggccaagggactctggtcaccgtctcctcaggtggtggtggttctggcggcggcggctccggtggtggtggttctcagactgttgtgactcaggaaccttcactcaccgtatcacctggtggaacagtcacactcacttgtggctcctcgactggggctgttacatctggcaactacccaaactgggtccaacaaaaaccaggtcaggcaccccgtggtctaataggtgggactaagttcctcgcccccggtactcctgccagattctcaggctccctgcttggaggcaaggctgccctcaccctctcaggggtacagccagaggatgaggcagaatattactgtgttctatggtacagcaaccgctgggtgttcggtggaggaaccaaactgactgtccta

SEQ ID NO: 547 - protein, 118 aa, artificial; identical to SEQ ID NO: 393
  PMH8E4-VH

SEQ ID NO: 548 - protein, 5 aa, artificial
  PMH8E4-HCDR1
DTYMD

SEQ ID NO: 549 - protein, 17 aa, artificial
  PMH8E4-HCDR2
RIDPANGDSKYDPKFQG

SEQ ID NO: 550 - protein, 9 aa, artificial
  PMH8E4-HCDR3
GGMIWYFDV

SEQ ID NO: 551 - DNA, 354 bp, artificial; identical to SEQ ID NO: 397
  PMH8E4-VH

SEQ ID NO: 552 - protein, 108 aa, artificial
  PMH8E4-VL
EIVLTQSPATLSLSPGERATLSCSASSSISSNYLHWYQQKPGLPPRLLIYRTSNLASGIPDRFSGSGSGTDYTLTISRLEPEDFATYYCQQGSSLPYTFGQGTKLEIK

SEQ ID NO: 553 - protein, 12 aa, artificial
  PMH8E4-LCDR1
SASSSISSNYLH

SEQ ID NO: 554 - protein, 7 aa, artificial
  PMH8E4-LCDR2
RTSNLAS

SEQ ID NO: 555 - protein, 9 aa, artificial
  PMH8E4-LCDR3
QQGSSLPYT

SEQ ID NO: 556 - DNA, 324 bp, artificial
  PMH8E4-VL
gagatcgtgctcacccagtctccagccaccctgtctctatctcccggggagagggccactctctcctgcagtgccagctcaagtataagttccaattacttgcattggtatcagcagaagccaggattgccccctagactcttgatttataggacatccaatctggcttctggaatcccagatcgcttcagtggcagtgggtctgggaccgattacactctcacaattagcaggctggagcctgaagattttgccacttactactgccagcagggtagtagtttaccgtacacgttcggacaagggaccaagcttgagatcaaa

SEQ ID NO: 557 - protein, 241 aa, artificial
  PMH8E4-VH-VL
QVQLVQSGAEVVKPGASVKLSCKASGFTITDTYMDWVRQAPGQGLEWIGRIDPANGDSKYDPKFQGRATITPDTSTNTVYMELSSLRSEDTAVYYCARGGMIWYFDVWGQGTTVTVSSGGGGSGGGGSGGGGSEIVLTQSPATLSLSPGERATLSCSASSSISSNYLHWYQQKPGLPPRLLIYRTSNLASGIPDRFSGSGSGTDYTLTISRLEPEDFATYYCQQGSSLPYTFGQGTKLEIK

SEQ ID NO: 558 - DNA, 723 bp, artificial
  PMH8E4-VH-VL
caggtgcagctggtccagtctggggcagaggttgtgaagccaggggcctcagtcaagttgtcctgcaaagcttctggcttcaccattacagacacctatatggactgggtgaggcaggcgcctggacagggcctggaatggattggaaggattgatcctgcgaatggtgatagtaaatatgacccgaaattccagggcagggccactataacaccagacacatccaccaacacagtctacatggagctcagcagcctgagatctgaggacactgccgtctattattgtgctagaggcgggatgatatggtacttcgatgtctggggccaagggaccacggtcaccgtctcctcaggtggtggtggttctggcggcggcggctccggtggtggtggttctgagatcgtgctcacccagtctccagccaccctgtctctatctcccggggagagggccactctctcctgcagtgccagctcaagtataagttccaattacttgcattggtatcagcagaagccaggattgccccctagactcttgatttataggacatccaatctggcttctggaatcccagatcgcttcagtggcagtgggtctgggaccgattacactctcacaattagcaggctggagcctgaagattttgccacttactactgccagcagggtagtagtttaccgtacacgttcggacaagggaccaagcttgagatcaaa

SEQ ID NO: 559 - protein, 496 aa, artificial
  PMH8E4-VH-VL x I2C VH-VL
QVQLVQSGAEVVKPGASVKLSCKASGFTITDTYMDWVRQAPGQGLEWIGRIDPANGDSKYDPKFQGRATITPDTSTNTVYMELSSLRSEDTAVYYCARGGMIWYFDVWGQGTTVTVSSGGGGSGGGGSGGGGSEIVLTQSPATLSLSPGERATLSCSASSSISSNYLHWYQQKPGLPPRLLIYRTSNLASGIPDRFSGSGSGTDYTLTISRLEPEDFATYYCQQGSSLPYTFGQGTKLEIKSGGGGSEVQLVESGGGLVQPGGSLKLSCAASGFTFNKYAMNWVRQAPGKGLEWVARIRSKYNNYATYYADSVKDRFTISRDDSKNTAYLQMNNLKTEDTAVYYCVRHGNFGNSYISYWAYWGQGTLVTVSSGGGGSGGGGSGGGGSQTVVTQEPSLTVSPGGTVTLTCGSSTGAVTSGNYPNWVQQKPGQAPRGLIGGTKFLAPGTPARFSGSLLGGKAALTLSGVQPEDEAEYYCVLWYSNRWVFGGGTKLTVL

SEQ ID NO: 560 - DNA, 1488 bp, artificial
  PMH8E4-VH-VL x I2C VH-VL
caggtgcagctggtccagtctggggcagaggttgtgaagccaggggcctcagtcaagttgtcctgcaaagcttctggcttcaccattacagacacctatatggactgggtgaggcaggcgcctggacagggcctggaatggattggaaggattgatcctgcgaatggtgatagtaaatatgacccgaaattccagggcagggccactataacaccagacacatccaccaacacagtctacatggagctcagcagcctgagatctgaggacactgccgtctattattgtgctagaggcgggatgatatggtacttcgatgtctggggccaagggaccacggtcaccgtctcctcaggtggtggtggttctggcggcggcggctccggtggtggtggttctgagatcgtgctcacccagtctccagccaccctgtctctatctcccggggagagggccactctctcctgcagtgccagctcaagtataagttccaattacttgcattggtatcagcagaagccaggattgccccctagactcttgatttataggacatccaatctggcttctggaatcccagatcgcttcagtggcagtgggtctgggaccgattacactctcacaattagcaggctggagcctgaagattttgccacttactactgccagcagggtagtagtttaccgtacacgttcggacaagggaccaagcttgagatcaaatccggaggtggtggatccgaggtgcagctggtcgagtctggaggaggattggtgcagcctggagggtcattgaaactctcatgtgcagcctctggattcaccttcaataagtacgccatgaactgggtccgccaggctccaggaaagggtttggaatgggttgctcgcataagaagtaaatataataattatgcaacatattatgccgattcagtgaaagacaggttcaccatctccagagatgattcaaaaaacactgcctatctacaaatgaacaacttgaaaactgaggacactgccgtgtactactgtgtgagacatgggaacttcggtaatagctacatatcctactgggcttactggggccaagggactctggtcaccgtctcctcaggtggtggtggttctggcggcggcggctccggtggtggtggttctcagactgttgtgactcaggaaccttcactcaccgtatcacctggtggaacagtcacactcacttgtggctcctcgactggggctgttacatctggcaactacccaaactgggtccaacaaaaaccaggtcaggcaccccgtggtctaataggtgggactaagttcctcgcccccggtactcctgccagattctcaggctccctgcttggaggcaaggctgccctcaccctctcaggggtacagccagaggatgaggcagaatattactgtgttctatggtacagcaaccgctgggtgttcggtggaggaaccaaactgactgtccta

SEQ ID NO: 561 - protein, 118 aa, artificial; identical to SEQ ID NO: 393
  PMH8G6-VH

SEQ ID NO: 562 - protein, 5 aa, artificial
  PMH8G6-HCDR1
DTYMD

SEQ ID NO: 563 - protein, 17 aa, artificial
  PMH8G6-HCDR2
RIDPANGDSKYDPKFQG

SEQ ID NO: 564 - protein, 9 aa, artificial
  PMH8G6-HCDR3
GGMIWYFDV

SEQ ID NO: 565 - DNA, 354 bp, artificial; identical to SEQ ID NO: 397
  PMH8G6-VH

SEQ ID NO: 566 - protein, 108 aa, artificial
  PMH8G6-VL
EIVLTQSPATMSLSPGERATISCSASSSISSNYLHWYQQKPGLPPKLLIYRTSNLASGIPDRFSGSGSGTDFTLTISRMEPEDFAVYYCQQGSSLPYTFGQGTKLEIK

SEQ ID NO: 567 - protein, 12 aa, artificial
  PMH8G6-LCDR1
SASSSISSNYLH

SEQ ID NO: 568 - protein, 7 aa, artificial
  PMH8G6-LCDR2
RTSNLAS

SEQ ID NO: 569 - protein, 9 aa, artificial
  PMH8G6-LCDR3
QQGSSLPYT

SEQ ID NO: 570 - DNA, 324 bp, artificial
  PMH8G6-VL
gagatcgtgctcacccagtctccagccaccatgtctctatctcccggggagagggccactatctcctgcagtgccagctcaagtataagttccaattacttgcattggtatcagcagaagccaggattgccccctaaactcttgatttataggacatccaatctggcttctggaatcccagatcgcttcagtggcagtgggtctgggaccgatttcactctcacaattagcaggatggagcctgaagattttgccgtttactactgccagcagggtagtagtttaccgtacacgttcggacaagggaccaagcttgagatcaaa

SEQ ID NO: 571 - protein, 241 aa, artificial
  PMH8G6-VH-VL
QVQLVQSGAEVVKPGASVKLSCKASGFTITDTYMDWVRQAPGQGLEWIGRIDPANGDSKYDPKFQGRATITPDTSTNTVYMELSSLRSEDTAVYYCARGGMIWYFDVWGQGTTVTVSSGGGGSGGGGSGGGGSEIVLTQSPATMSLSPGERATISCSASSSISSNYLHWYQQKPGLPPKLLIYRTSNLASGIPDRFSGSGSGTDFTLTISRMEPEDFAVYYCQQGSSLPYTFGQGTKLEIK

SEQ ID NO: 572 - DNA, 723 bp, artificial
  PMH8G6-VH-VL
caggtgcagctggtccagtctggggcagaggttgtgaagccaggggcctcagtcaagttgtcctgcaaagcttctggcttcaccattacagacacctatatggactgggtgaggcaggcgcctggacagggcctggaatggattggaaggattgatcctgcgaatggtgatagtaaatatgacccgaaattccagggcagggccactataacaccagacacatccaccaacacagtctacatggagctcagcagcctgagatctgaggacactgccgtctattattgtgctagaggcgggatgatatggtacttcgatgtctggggccaagggaccacggtcaccgtctcctcaggtggtggtggttctggcggcggcggctccggtggtggtggttctgagatcgtgctcacccagtctccagccaccatgtctctatctcccggggagagggccactatctcctgcagtgccagctcaagtataagttccaattacttgcattggtatcagcagaagccaggattgccccctaaactcttgatttataggacatccaatctggcttctggaatcccagatcgcttcagtggcagtgggtctgggaccgatttcactctcacaattagcaggatggagcctgaagattttgccgtttactactgccagcagggtagtagtttaccgtacacgttcggacaagggaccaagcttgagatcaaa

SEQ ID NO: 573 - protein, 496 aa, artificial
  PMH8G6-VH-VL x I2C VH-VL
QVQLVQSGAEVVKPGASVKLSCKASGFTITDTYMDWVRQAPGQGLEWIGRIDPANGDSKYDPKFQGRATITPDTSTNTVYMELSSLRSEDTAVYYCARGGMIWYFDVWGQGTTVTVSSGGGGSGGGGSGGGGSEIVLTQSPATMSLSPGERATISCSASSSISSNYLHWYQQKPGLPPKLLIYRTSNLASGIPDRFSGSGSGTDFTLTISRMEPEDFAVYYCQQGSSLPYTFGQGTKLEIKSGGGGSEVQLVESGGGLVQPGGSLKLSCAASGFTFNKYAMNWVRQAPGKGLEWVARIRSKYNNYATYYADSVKDRFTISRDDSKNTAYLQMNNLKTEDTAVYYCVRHGNFGNSYISYWAYWGQGTLVTVSSGGGGSGGGGSGGGGSQTVVTQEPSLTVSPGGTVTLTCGSSTGAVTSGNYPNWVQQKPGQAPRGLIGGTKFLAPGTPARFSGSLLGGKAALTLSGVQPEDEAEYYCVLWYSNRWVFGGGTKLTVL

SEQ ID NO: 574 - DNA, 1488 bp, artificial
  PMH8G6-VH-VL x I2C VH-VL
caggtgcagctggtccagtctggggcagaggttgtgaagccaggggcctcagtcaagttgtcctgcaaagcttctggcttcaccattacagacacctatatggactgggtgaggcaggcgcctggacagggcctggaatggattggaaggattgatcctgcgaatggtgatagtaaatatgacccgaaattccagggcagggccactataacaccagacacatccaccaacacagtctacatggagctcagcagcctgagatctgaggacactgccgtctattattgtgctagaggcgggatgatatggtacttcgatgtctggggccaagggaccacggtcaccgtctcctcaggtggtggtggttctggcggcggcggctccggtggtggtggttctgagatcgtgctcacccagtctccagccaccatgtctctatctcccggggagagggccactatctcctgcagtgccagctcaagtataagttccaattacttgcattggtatcagcagaagccaggattgccccctaaactcttgatttataggacatccaatctggcttctggaatcccagatcgcttcagtggcagtgggtctgggaccgatttcactctcacaattagcaggatggagcctgaagattttgccgtttactactgccagcagggtagtagtttaccgtacacgttcggacaagggaccaagcttgagatcaaatccggaggtggtggatccgaggtgcagctggtcgagtctggaggaggattggtgcagcctggagggtcattgaaactctcatgtgcagcctctggattcaccttcaataagtacgccatgaactgggtccgccaggctccaggaaagggtttggaatgggttgctcgcataagaagtaaatataataattatgcaacatattatgccgattcagtgaaagacaggttcaccatctccagagatgattcaaaaaacactgcctatctacaaatgaacaacttgaaaactgaggacactgccgtgtactactgtgtgagacatgggaacttcggtaatagctacatatcctactgggcttactggggccaagggactctggtcaccgtctcctcaggtggtggtggttctggcggcggcggctccggtggtggtggttctcagactgttgtgactcaggaaccttcactcaccgtatcacctggtggaacagtcacactcacttgtggctcctcgactggggctgttacatctggcaactacccaaactgggtccaacaaaaaccaggtcaggcaccccgtggtctaataggtgggactaagttcctcgcccccggtactcctgccagattctcaggctccctgcttggaggcaaggctgccctcaccctctcaggggtacagccagaggatgaggcagaatattactgtgttctatggtacagcaaccgctgggtgttcggtggaggaaccaaactgactgtccta

SEQ ID NO: 575 - protein, 118 aa, artificial; identical to SEQ ID NO: 379
  PMH5H2-VH

SEQ ID NO: 576 - protein, 5 aa, artificial
  PMH5H2-HCDR1
DTYMD

SEQ ID NO: 577 - protein, 17 aa, artificial
  PMH5H2-HCDR2
RIDPANGDSKYDPKFQG

SEQ ID NO: 578 - protein, 9 aa, artificial
  PMH5H2-HCDR3
GGMIWYFDV

SEQ ID NO: 579 - DNA, 354 bp, artificial; identical to SEQ ID NO: 383
  PMH5H2-VH

SEQ ID NO: 580 - protein, 108 aa, artificial
  PMH5H2-VL
EIVLTQSPATMALSPGERATLSCSASSSISSNYLHWYQQKPGLPPRLLIYRTSNLASGIPDRFSGSGSGTDFTLTISRLEPEDVAVYYCQQGSSLPYTFGQGTKLEIK

SEQ ID NO: 581 - protein, 12 aa, artificial
  PMH5H2-LCDR1
SASSSISSNYLH

SEQ ID NO: 582 - protein, 7 aa, artificial
  PMH5H2-LCDR2
RTSNLAS

SEQ ID NO: 583 - protein, 9 aa, artificial
  PMH5H2-LCDR3
QQGSSLPYT

SEQ ID NO: 584 - DNA, 324 bp, artificial
  PMH5H2-VL
gagatcgtgctcacccagtctccagccaccatggctctatctcccggggagagggccactctctcctgcagtgccagctcaagtataagttccaattacttgcattggtatcagcagaagccaggattgccccctagactcttgatttataggacatccaatctggcttctggaatcccagatcgcttcagtggcagtgggtctgggaccgatttcactctcacaattagcaggctggagcctgaagatgttgccgtttactactgccagcagggtagtagtttaccgtacacgttcggacaagggaccaagcttgagatcaaa

SEQ ID NO: 585 - protein, 241 aa, artificial
  PMH5H2-VH-VL
QVQLVQSGAEVKKPGASVKVSCKASGYNFKDTYMDWVKQTPEQGLEWMGRIDPANGDSKYDPKFQGRVTITADTSTNTAYMELSSLRSEDTAVYYCARGGMIWYFDVWGQGTTVTVSSGGGGSGGGGSGGGGSEIVLTQSPATMALSPGERATLSCSASSSISSNYLHWYQQKPGLPPRLLIYRTSNLASGIPDRFSGSGSGTDFTLTISRLEPEDVAVYYCQQGSSLPYTFGQGTKLEIK

SEQ ID NO: 586 - DNA, 723 bp, artificial
  PMH5H2-VH-VL
caggtgcagctggtccagtctggggcagaggttaagaagccaggggcctcagtcaaggtgtcctgcaaagcttctggctacaactttaaagacacctatatggactgggtgaagcagacgcctgaacagggcctggaatggatgggaaggattgatcctgcgaatggtgatagtaaatatgacccgaaattccagggcagggtcactataacagcagacacatccaccaacacagcctacatggagctcagcagcctgagatctgaggacactgccgtctattattgtgctagaggcgggatgatatggtacttcgatgtctggggccaagggaccacggtcaccgtctcctcaggtggtggtggttctggcggcggcggctccggtggtggtggttctgagatcgtgctcacccagtctccagccaccatggctctatctcccggggagagggccactctctcctgcagtgccagctcaagtataagttccaattacttgcattggtatcagcagaagccaggattgccccctagactcttgatttataggacatccaatctggcttctggaatcccagatcgcttcagtggcagtgggtctgggaccgatttcactctcacaattagcaggctggagcctgaagatgttgccgtttactactgccagcagggtagtagtttaccgtacacgttcggacaagggaccaagcttgagatcaaa

SEQ ID NO: 587 - protein, 496 aa, artificial
  PMH5H2-VH-VL x I2C VH-VL
QVQLVQSGAEVKKPGASVKVSCKASGYNFKDTYMDWVKQTPEQGLEWMGRIDPANGDSKYDPKFQGRVTITADTSTNTAYMELSSLRSEDTAVYYCARGGMIWYFDVWGQGTTVTVSSGGGGSGGGGSGGGGSEIVLTQSPATMALSPGERATLSCSASSSISSNYLHWYQQKPGLPPRLLIYRTSNLASGIPDRFSGSGSGTDFTLTISRLEPEDVAVYYCQQGSSLPYTFGQGTKLEIKSGGGGSEVQLVESGGGLVQPGGSLKLSCAASGFTFNKYAMNWVRQAPGKGLEWVARIRSKYNNYATYYADSVKDRFTISRDDSKNTAYLQMNNLKTEDTAVYYCVRHGNFGNSYISYWAYWGQGTLVTVSSGGGGSGGGGSGGGGSQTVVTQEPSLTVSPGGTVTLTCGSSTGAVTSGNYPNWVQQKPGQAPRGLIGGTKFLAPGTPARFSGSLLGGKAALTLSGVQPEDEAEYYCVLWYSNRWVFGGGTKLTVL

SEQ ID NO: 588 - DNA, 1488 bp, artificial
  PMH5H2-VH-VL x I2C VH-VL
caggtgcagctggtccagtctggggcagaggttaagaagccaggggcctcagtcaaggtgtcctgcaaagcttctggctacaactttaaagacacctatatggactgggtgaagcagacgcctgaacagggcctggaatggatgggaaggattgatcctgcgaatggtgatagtaaatatgacccgaaattccagggcagggtcactataacagcagacacatccaccaacacagcctacatggagctcagcagcctgagatctgaggacactgccgtctattattgtgctagaggcgggatgatatggtacttcgatgtctggggccaagggaccacggtcaccgtctcctcaggtggtggtggttctggcggcggcggctccggtggtggtggttctgagatcgtgctcacccagtctccagccaccatggctctatctcccggggagagggccactctctcctgcagtgccagctcaagtataagttccaattacttgcattggtatcagcagaagccaggattgccccctagactcttgatttataggacatccaatctggcttctggaatcccagatcgcttcagtggcagtgggtctgggaccgatttcactctcacaattagcaggctggagcctgaagatgttgccgtttactactgccagcagggtagtagtttaccgtacacgttcggacaagggaccaagcttgagatcaaatccggaggtggtggatccgaggtgcagctggtcgagtctggaggaggattggtgcagcctggagggtcattgaaactctcatgtgcagcctctggattcaccttcaataagtacgccatgaactgggtccgccaggctccaggaaagggtttggaatgggttgctcgcataagaagtaaatataataattatgcaacatattatgccgattcagtgaaagacaggttcaccatctccagagatgattcaaaaaacactgcctatctacaaatgaacaacttgaaaactgaggacactgccgtgtactactgtgtgagacatgggaacttcggtaatagctacatatcctactgggcttactggggccaagggactctggtcaccgtctcctcaggtggtggtggttctggcggcggcggctccggtggtggtggttctcagactgttgtgactcaggaaccttcactcaccgtatcacctggtggaacagtcacactcacttgtggctcctcgactggggctgttacatctggcaactacccaaactgggtccaacaaaaaccaggtcaggcaccccgtggtctaataggtgggactaagttcctcgcccccggtactcctgccagattctcaggctccctgcttggaggcaaggctgccctcaccctctcaggggtacagccagaggatgaggcagaatattactgtgttctatggtacagcaaccgctgggtgttcggtggaggaaccaaactgactgtccta

SEQ ID NO: 589 - protein, 118 aa, artificial; identical to SEQ ID NO: 393
  PMH8H2-VH

SEQ ID NO: 590 - protein, 5 aa, artificial
  PMH8H2-HCDR1
DTYMD

SEQ ID NO: 591 - protein, 17 aa, artificial
  PMH8H2-HCDR2
RIDPANGDSKYDPKFQG

SEQ ID NO: 592 - protein, 9 aa, artificial
  PMH8H2-HCDR3
GGMIWYFDV

SEQ ID NO: 593 - DNA, 354 bp, artificial; identical to SEQ ID NO: 397
  PMH8H2-VH

SEQ ID NO: 594 - protein, 108 aa, artificial; identical to SEQ ID NO: 580
  PMH8H2-VL

SEQ ID NO: 595 - protein, 12 aa, artificial
  PMH8H2-LCDR1
SASSSISSNYLH

SEQ ID NO: 596 - protein, 7 aa, artificial
  PMH8H2-LCDR2
RTSNLAS

SEQ ID NO: 597 - protein, 9 aa, artificial
  PMH8H2-LCDR3
QQGSSLPYT

SEQ ID NO: 598 - DNA, 324 bp, artificial; identical to SEQ ID NO: 584
  PMH8H2-VL

SEQ ID NO: 599 - protein, 241 aa, artificial
  PMH8H2-VH-VL
QVQLVQSGAEVVKPGASVKLSCKASGFTITDTYMDWVRQAPGQGLEWIGRIDPANGDSKYDPKFQGRATITPDTSTNTVYMELSSLRSEDTAVYYCARGGMIWYFDVWGQGTTVTVSSGGGGSGGGGSGGGGSEIVLTQSPATMALSPGERATLSCSASSSISSNYLHWYQQKPGLPPRLLIYRTSNLASGIPDRFSGSGSGTDFTLTISRLEPEDVAVYYCQQGSSLPYTFGQGTKLEIK

SEQ ID NO: 600 - DNA, 723 bp, artificial
  PMH8H2-VH-VL
caggtgcagctggtccagtctggggcagaggttgtgaagccaggggcctcagtcaagttgtcctgcaaagcttctggcttcaccattacagacacctatatggactgggtgaggcaggcgcctggacagggcctggaatggattggaaggattgatcctgcgaatggtgatagtaaatatgacccgaaattccagggcagggccactataacaccagacacatccaccaacacagtctacatggagctcagcagcctgagatctgaggacactgccgtctattattgtgctagaggcgggatgatatggtacttcgatgtctggggccaagggaccacggtcaccgtctcctcaggtggtggtggttctggcggcggcggctccggtggtggtggttctgagatcgtgctcacccagtctccagccaccatggctctatctcccggggagagggccactctctcctgcagtgccagctcaagtataagttccaattacttgcattggtatcagcagaagccaggattgccccctagactcttgatttataggacatccaatctggcttctggaatcccagatcgcttcagtggcagtgggtctgggaccgatttcactctcacaattagcaggctggagcctgaagatgttgccgtttactactgccagcagggtagtagtttaccgtacacgttcggacaagggaccaagcttgagatcaaa

SEQ ID NO: 601 - protein, 496 aa, artificial
  PMH8H2-VH-VL x I2C VH-VL
QVQLVQSGAEVVKPGASVKLSCKASGFTITDTYMDWVRQAPGQGLEWIGRIDPANGDSKYDPKFQGRATITPDTSTNTVYMELSSLRSEDTAVYYCARGGMIWYFDVWGQGTTVTVSSGGGGSGGGGSGGGGSEIVLTQSPATMALSPGERATLSCSASSSISSNYLHWYQQKPGLPPRLLIYRTSNLASGIPDRFSGSGSGTDFTLTISRLEPEDVAVYYCQQGSSLPYTFGQGTKLEIKSGGGGSEVQLVESGGGLVQPGGSLKLSCAASGFTFNKYAMNWVRQAPGKGLEWVARIRSKYNNYATYYADSVKDRFTISRDDSKNTAYLQMNNLKTEDTAVYYCVRHGNFGNSYISYWAYWGQGTLVTVSSGGGGSGGGGSGGGGSQTVVTQEPSLTVSPGGTVTLTCGSSTGAVTSGNYPNWVQQKPGQAPRGLIGGTKFLAPGTPARFSGSLLGGKAALTLSGVQPEDEAEYYCVLWYSNRWVFGGGTKLTVL

SEQ ID NO: 602 - DNA, 1488 bp, artificial
  PMH8H2-VH-VL x I2C VH-VL
caggtgcagctggtccagtctggggcagaggttgtgaagccaggggcctcagtcaagttgtcctgcaaagcttctggcttcaccattacagacacctatatggactgggtgaggcaggcgcctggacagggcctggaatggattggaaggattgatcctgcgaatggtgatagtaaatatgacccgaaattccagggcagggccactataacaccagacacatccaccaacacagtctacatggagctcagcagcctgagatctgaggacactgccgtctattattgtgctagaggcgggatgatatggtacttcgatgtctggggccaagggaccacggtcaccgtctcctcaggtggtggtggttctggcggcggcggctccggtggtggtggttctgagatcgtgctcacccagtctccagccaccatggctctatctcccggggagagggccactctctcctgcagtgccagctcaagtataagttccaattacttgcattggtatcagcagaagccaggattgccccctagactcttgatttataggacatccaatctggcttctggaatcccagatcgcttcagtggcagtgggtctgggaccgatttcactctcacaattagcaggctggagcctgaagatgttgccgtttactactgccagcagggtagtagtttaccgtacacgttcggacaagggaccaagcttgagatcaaatccggaggtggtggatccgaggtgcagctggtcgagtctggaggaggattggtgcagcctggagggtcattgaaactctcatgtgcagcctctggattcaccttcaataagtacgccatgaactgggtccgccaggctccaggaaagggtttggaatgggttgctcgcataagaagtaaatataataattatgcaacatattatgccgattcagtgaaagacaggttcaccatctccagagatgattcaaaaaacactgcctatctacaaatgaacaacttgaaaactgaggacactgccgtgtactactgtgtgagacatgggaacttcggtaatagctacatatcctactgggcttactggggccaagggactctggtcaccgtctcctcaggtggtggtggttctggcggcggcggctccggtggtggtggttctcagactgttgtgactcaggaaccttcactcaccgtatcacctggtggaacagtcacactcacttgtggctcctcgactggggctgttacatctggcaactacccaaactgggtccaacaaaaaccaggtcaggcaccccgtggtctaataggtgggactaagttcctcgcccccggtactcctgccagattctcaggctccctgcttggaggcaaggctgccctcaccctctcaggggtacagccagaggatgaggcagaatattactgtgttctatggtacagcaaccgctgggtgttcggtggaggaaccaaactgactgtccta

SEQ ID NO: 603 - protein, 118 aa, artificial; identical to SEQ ID NO: 393
  PMH8H3-VH

SEQ ID NO: 604 - protein, 5 aa, artificial
  PMH8H3-HCDR1
DTYMD

SEQ ID NO: 605 - protein, 17 aa, artificial
  PMH8H3-HCDR2
RIDPANGDSKYDPKFQG

SEQ ID NO: 606 - protein, 9 aa, artificial
  PMH8H3-HCDR3
GGMIWYFDV

SEQ ID NO: 607 - DNA, 354 bp, artificial; identical to SEQ ID NO: 397
  PMH8H3-VH

SEQ ID NO: 608 - protein, 108 aa, artificial
  PMH8H3-VL
EIVLTQSPATLSLSPGERITLSCSASSSISSNYLHWYQQKPGLPPRLLIYRTSNLASGIPDRFSGSGSGTDFTLTIGTLEPEDFAVYYCQQGSSLPYTFGQGTKLEIK

SEQ ID NO: 609 - protein, 12 aa, artificial
  PMH8H3-LCDR1
SASSSISSNYLH

SEQ ID NO: 610 - protein, 7 aa, artificial
  PMH8H3-LCDR2
RTSNLAS

SEQ ID NO: 611 - protein, 9 aa, artificial
  PMH8H3-LCDR3
QQGSSLPYT

SEQ ID NO: 612 - DNA, 324 bp, artificial
  PMH8H3-VL
gagatcgtgctcacccagtctccagccaccctgtctctatctcccggggagaggatcactctctcctgcagtgccagctcaagtataagttccaattacttgcattggtatcagcagaagccaggattaccccctagactcttgatttataggacatccaatctggcttctggaatcccagatcgcttcagtggcagtgggtctgggaccgatttcactctcacaattggcacgctggagcctgaagattttgccgtttactactgccagcagggtagtagtttaccgtacacgttcggacaagggaccaagcttgagatcaaa

SEQ ID NO: 613 - protein, 241 aa, artificial
  PMH8H3-VH-VL
QVQLVQSGAEVVKPGASVKLSCKASGFTITDTYMDWVRQAPGQGLEWIGRIDPANGDSKYDPKFQGRATITPDTSTNTVYMELSSLRSEDTAVYYCARGGMIWYFDVWGQGTTVTVSSGGGGSGGGGSGGGGSEIVLTQSPATLSLSPGERITLSCSASSSISSNYLHWYQQKPGLPPRLLIYRTSNLASGIPDRFSGSGSGTDFTLTIGTLEPEDFAVYYCQQGSSLPYTFGQGTKLEIK

SEQ ID NO: 614 - DNA, 723 bp, artificial
  PMH8H3-VH-VL
caggtgcagctggtccagtctggggcagaggttgtgaagccaggggcctcagtcaagttgtcctgcaaagcttctggcttcaccattacagacacctatatggactgggtgaggcaggcgcctggacagggcctggaatggattggaaggattgatcctgcgaatggtgatagtaaatatgacccgaaattccagggcagggccactataacaccagacacatccaccaacacagtctacatggagctcagcagcctgagatctgaggacactgccgtctattattgtgctagaggcgggatgatatggtacttcgatgtctggggccaagggaccacggtcaccgtctcctcaggtggtggtggttctggcggcggcggctccggtggtggtggttctgagatcgtgctcacccagtctccagccaccctgtctctatctcccggggagaggatcactctctcctgcagtgccagctcaagtataagttccaattacttgcattggtatcagcagaagccaggattaccccctagactcttgatttataggacatccaatctggcttctggaatcccagatcgcttcagtggcagtgggtctgggaccgatttcactctcacaattggcacgctggagcctgaagattttgccgtttactactgccagcagggtagtagtttaccgtacacgttcggacaagggaccaagcttgagatcaaa

SEQ ID NO: 615 - protein, 496 aa, artificial
  PMH8H3-VH-VL x I2C VH-VL
QVQLVQSGAEVVKPGASVKLSCKASGFTITDTYMDWVRQAPGQGLEWIGRIDPANGDSKYDPKFQGRATITPDTSTNTVYMELSSLRSEDTAVYYCARGGMIWYFDVWGQGTTVTVSSGGGGSGGGGSGGGGSEIVLTQSPATLSLSPGERITLSCSASSSISSNYLHWYQQKPGLPPRLLIYRTSNLASGIPDRFSGSGSGTDFTLTIGTLEPEDFAVYYCQQGSSLPYTFGQGTKLEIKSGGGGSEVQLVESGGGLVQPGGSLKLSCAASGFTFNKYAMNWVRQAPGKGLEWVARIRSKYNNYATYYADSVKDRFTISRDDSKNTAYLQMNNLKTEDTAVYYCVRHGNFGNSYISYWAYWGQGTLVTVSSGGGGSGGGGSGGGGSQTVVTQEPSLTVSPGGTVTLTCGSSTGAVTSGNYPNWVQQKPGQAPRGLIGGTKFLAPGTPARFSGSLLGGKAALTLSGVQPEDEAEYYCVLWYSNRWVFGGGTKLTVL

SEQ ID NO: 616 - DNA, 1488 bp, artificial
  PMH8H3-VH-VL x I2C VH-VL
caggtgcagctggtccagtctggggcagaggttgtgaagccaggggcctcagtcaagttgtcctgcaaagcttctggcttcaccattacagacacctatatggactgggtgaggcaggcgcctggacagggcctggaatggattggaaggattgatcctgcgaatggtgatagtaaatatgacccgaaattccagggcagggccactataacaccagacacatccaccaacacagtctacatggagctcagcagcctgagatctgaggacactgccgtctattattgtgctagaggcgggatgatatggtacttcgatgtctggggccaagggaccacggtcaccgtctcctcaggtggtggtggttctggcggcggcggctccggtggtggtggttctgagatcgtgctcacccagtctccagccaccctgtctctatctcccggggagaggatcactctctcctgcagtgccagctcaagtataagttccaattacttgcattggtatcagcagaagccaggattaccccctagactcttgatttataggacatccaatctggcttctggaatcccagatcgcttcagtggcagtgggtctgggaccgatttcactctcacaattggcacgctggagcctgaagattttgccgtttactactgccagcagggtagtagtttaccgtacacgttcggacaagggaccaagcttgagatcaaatccggaggtggtggatccgaggtgcagctggtcgagtctggaggaggattggtgcagcctggagggtcattgaaactctcatgtgcagcctctggattcaccttcaataagtacgccatgaactgggtccgccaggctccaggaaagggtttggaatgggttgctcgcataagaagtaaatataataattatgcaacatattatgccgattcagtgaaagacaggttcaccatctccagagatgattcaaaaaacactgcctatctacaaatgaacaacttgaaaactgaggacactgccgtgtactactgtgtgagacatgggaacttcggtaatagctacatatcctactgggcttactggggccaagggactctggtcaccgtctcctcaggtggtggtggttctggcggcggcggctccggtggtggtggttctcagactgttgtgactcaggaaccttcactcaccgtatcacctggtggaacagtcacactcacttgtggctcctcgactggggctgttacatctggcaactacccaaactgggtccaacaaaaaccaggtcaggcaccccgtggtctaataggtgggactaagttcctcgcccccggtactcctgccagattctcaggctccctgcttggaggcaaggctgccctcaccctctcaggggtacagccagaggatgaggcagaatattactgtgttctatggtacagcaaccgctgggtgttcggtggaggaaccaaactgactgtccta

SEQ ID NO: 617 - protein, 120 aa, artificial
  PM74G3-VH
QVQLVQSGAEVKKPGASVKLSCKASGYTFTYFDINWVRQAPEQGLEWMGGISPGDGNTNYNENFKGRVTMTIDTSSSTAYIELSRLTSDDTAVYYCARDGNFPYYAMDSWGQGTTVTVSS

SEQ ID NO: 618 - protein, 5 aa, artificial
  PM74G3-HCDR1
YFDIN

SEQ ID NO: 619 - protein, 17 aa, artificial
  PM74G3-HCDR2
GISPGDGNTNYNENFKG

SEQ ID NO: 620 - protein, 11 aa, artificial
  PM74G3-HCDR3
DGNFPYYAMDS

SEQ ID NO: 621 - DNA, 360 bp, artificial
  PM74G3-VH
caggtgcagctggtccagtctggcgccgaagtgaagaagcctggcgcctccgtgaagctgtcctgcaaggcctccggctacaccttcacctacttcgacatcaactgggtgcggcaggcgcctgagcagggcctggaatggatgggcggcatctcccctggcgacggcaacaccaactacaacgagaacttcaagggcagggtcacaatgaccatagacacgtccagctccaccgcctacatcgagctgtcccggctgacatctgacgacaccgccgtgtactactgcgccagggacggcaacttcccttactacgccatggactcttggggccagggcaccacggtgaccgtctcctca

SEQ ID NO: 622 - protein, 112 aa, artificial
  PM74G3-VL
DVVMTQTPLSLPVSLGDQASISCRSSQSLVHSNGNTYLHWYLQKPGQSPKLLIYKVSNRFSGVPDRFSGSGSGTDFTLKISRVEAEDLGVYFCSQSTHVPYTFGGGTKLEIK

SEQ ID NO: 623 - protein, 16 aa, artificial
  PM74G3-LCDR1
RSSQSLVHSNGNTYLH

SEQ ID NO: 624 - protein, 7 aa, artificial
  PM74G3-LCDR2
KVSNRFS

SEQ ID NO: 625 - protein, 9 aa, artificial
  PM74G3-LCDR3
SQSTHVPYT

SEQ ID NO: 626 - DNA, 336 bp, artificial
  PM74G3-VL
gacgtcgtgatgacccagactccactctccctgcctgtcagtcttggagatcaagcctccatctcttgcagatctagtcagagccttgtacacagtaatggaaacacctatttacattggtacctgcagaagccaggccagtctccaaagctcctgatctacaaagtttccaaccgattttctggggtcccagacaggttcagtggcagtggatcagggacagatttcacactcaagatcagcagagtggaggctgaggatctgggagtttatttctgctctcaaagtacacatgttccgtacacgttcggaggggggaccaagcttgagatcaaa

SEQ ID NO: 627 - protein, 247 aa, artificial
  PM74G3-VH-VL
QVQLVQSGAEVKKPGASVKLSCKASGYTFTYFDINWVRQAPEQGLEWMGGISPGDGNTNYNENFKGRVTMTIDTSSSTAYIELSRLTSDDTAVYYCARDGNFPYYAMDSWGQGTTVTVSSGGGGSGGGGSGGGGSDVVMTQTPLSLPVSLGDQASISCRSSQSLVHSNGNTYLHWYLQKPGQSPKLLIYKVSNRFSGVPDRFSGSGSGTDFTLKISRVEAEDLGVYFCSQSTHVPYTFGGGTKLEIK

SEQ ID NO: 628 - DNA, 741 bp, artificial
  PM74G3-VH-VL
caggtgcagctggtccagtctggcgccgaagtgaagaagcctggcgcctccgtgaagctgtcctgcaaggcctccggctacaccttcacctacttcgacatcaactgggtgcggcaggcgcctgagcagggcctggaatggatgggcggcatctcccctggcgacggcaacaccaactacaacgagaacttcaagggcagggtcacaatgaccatagacacgtccagctccaccgcctacatcgagctgtcccggctgacatctgacgacaccgccgtgtactactgcgccagggacggcaacttcccttactacgccatggactcttggggccagggcaccacggtgaccgtctcctcaggtggtggtggttctggcggcggcggctccggtggtggtggttctgacgtcgtgatgacccagactccactctccctgcctgtcagtcttggagatcaagcctccatctcttgcagatctagtcagagccttgtacacagtaatggaaacacctatttacattggtacctgcagaagccaggccagtctccaaagctcctgatctacaaagtttccaaccgattttctggggtcccagacaggttcagtggcagtggatcagggacagatttcacactcaagatcagcagagtggaggctgaggatctgggagtttatttctgctctcaaagtacacatgttccgtacacgttcggaggggggaccaagcttgagatcaaa

SEQ ID NO: 629 - protein, 502 aa, artificial
  PM74G3-VH-VL x I2C VH-VL
QVQLVQSGAEVKKPGASVKLSCKASGYTFTYFDINWVRQAPEQGLEWMGGISPGDGNTNYNENFKGRVTMTIDTSSSTAYIELSRLTSDDTAVYYCARDGNFPYYAMDSWGQGTTVTVSSGGGGSGGGGSGGGGSDVVMTQTPLSLPVSLGDQASISCRSSQSLVHSNGNTYLHWYLQKPGQSPKLLIYKVSNRFSGVPDRFSGSGSGTDFTLKISRVEAEDLGVYFCSQSTHVPYTFGGGTKLEIKSGGGGSEVQLVESGGGLVQPGGSLKLSCAASGFTFNKYAMNWVRQAPGKGLEWVARIRSKYNNYATYYADSVKDRFTISRDDSKNTAYLQMNNLKTEDTAVYYCVRHGNFGNSYISYWAYWGQGTLVTVSSGGGGSGGGGSGGGGSQTVVTQEPSLTVSPGGTVTLTCGSSTGAVTSGNYPNWVQQKPGQAPRGLIGGTKFLAPGTPARFSGSLLGGKAALTLSGVQPEDEAEYYCVLWYSNRWVFGGGTKLTVL

SEQ ID NO: 630 - DNA, 1506 bp, artificial
  PM74G3-VH-VL x I2C VH-VL
caggtgcagctggtccagtctggcgccgaagtgaagaagcctggcgcctccgtgaagctgtcctgcaaggcctccggctacaccttcacctacttcgacatcaactgggtgcggcaggcgcctgagcagggcctggaatggatgggcggcatctcccctggcgacggcaacaccaactacaacgagaacttcaagggcagggtcacaatgaccatagacacgtccagctccaccgcctacatcgagctgtcccggctgacatctgacgacaccgccgtgtactactgcgccagggacggcaacttcccttactacgccatggactcttggggccagggcaccacggtgaccgtctcctcaggtggtggtggttctggcggcggcggctccggtggtggtggttctgacgtcgtgatgacccagactccactctccctgcctgtcagtcttggagatcaagcctccatctcttgcagatctagtcagagccttgtacacagtaatggaaacacctatttacattggtacctgcagaagccaggccagtctccaaagctcctgatctacaaagtttccaaccgattttctggggtcccagacaggttcagtggcagtggatcagggacagatttcacactcaagatcagcagagtggaggctgaggatctgggagtttatttctgctctcaaagtacacatgttccgtacacgttcggaggggggaccaagcttgagatcaaatccggaggtggtggatccgaggtgcagctggtcgagtctggaggaggattggtgcagcctggagggtcattgaaactctcatgtgcagcctctggattcaccttcaataagtacgccatgaactgggtccgccaggctccaggaaagggtttggaatgggttgctcgcataagaagtaaatataataattatgcaacatattatgccgattcagtgaaagacaggttcaccatctccagagatgattcaaaaaacactgcctatctacaaatgaacaacttgaaaactgaggacactgccgtgtactactgtgtgagacatgggaacttcggtaatagctacatatcctactgggcttactggggccaagggactctggtcaccgtctcctcaggtggtggtggttctggcggcggcggctccggtggtggtggttctcagactgttgtgactcaggaaccttcactcaccgtatcacctggtggaacagtcacactcacttgtggctcctcgactggggctgttacatctggcaactacccaaactgggtccaacaaaaaccaggtcaggcaccccgtggtctaataggtgggactaagttcctcgcccccggtactcctgccagattctcaggctccctgcttggaggcaaggctgccctcaccctctcaggggtacagccagaggatgaggcagaatattactgtgttctatggtacagcaaccgctgggtgttcggtggaggaaccaaactgactgtccta

SEQ ID NO: 631 - protein, 27 aa, Macaca fascicularis
QDGNEEMGSITQTPYQVSISGTTILTC

SEQ ID NO: 632 - protein, 27 aa, Macaca fascicularis
QDGNEEMGSITQTPYQVSISGTTVILT

SEQ ID NO: 633 - protein, 27 aa, Macaca mulatta
QDGNEEMGSITQTPYHVSISGTTVILT

1. A bispecific single chain antibody molecule comprising a first binding domain which is an antigen-interaction site, capable of binding to an epitope of human and Callithrix jacchus, Saguinis oedipus or Saimiri sciureus CD3E (epsilon) chain, wherein the epitope is part of an amino acid sequence comprised in the group consisting of SEQ ID NOs. 2, 4, 6, or 8, and comprises at least the amino acid sequence Gln-Asp-Gly-Asn-Glu (QDGNE), and a second binding domain capable of binding to prostate-specific membrane antigen (PSMA).

2. The polypeptide as defined in claim 1, wherein the epitope is part of an amino acid sequence comprised in the group consisting of SEQ ID NOs:2, 4, 6 and 8 and comprises at least the amino acid sequence Gln-Asp-Gly-Asn-Glu.

3. The bispecific single chain antibody molecule of claim 1, wherein at least one of said first or second binding domain is CDR-grafted, humanized or human.

4. The bispecific single chain antibody molecule according to claim 1, wherein the first binding domain capable of binding to an epitope of human and non-chimpanzee primate CD3E chain comprises a VL region comprising CDR-L1, CDR-L2 and CDR-L3 selected from the group consisting of:
(a) CDR-L1 as depicted in SEQ ID NO. 27, CDR-L2 as depicted in SEQ ID NO. 28 and CDR-L3 as depicted in SEQ ID NO. 29;
(b) CDR-L1 as depicted in SEQ ID NO. 117, CDR-L2 as depicted in SEQ 10 NO. 118 and CDR-L3 as depicted in SEQ ID NO. 119; and
(c) CDR-L1 as depicted in SEQ ID NO. 153, CDR-L2 as depicted in SEQ 10 NO. 154 and CDR-L3 as depicted in SEQ ID NO. 155.

5. The bispecific single chain antibody molecule according to claim 1, wherein the first binding domain capable of binding to an epitope of human and non-chimpanzee primate CD3E chain comprises a VH region comprising CDR-H1, CDR-H2 and CDR-H3 selected from the group consisting of:
(a) COR-H1 as depicted in SEQ ID NO. 12, COR-H2 as depicted in SEQ ID NO. 13 and COR-H3 as depicted in SEQ ID NO. 14;
(b) COR-H1 as depicted in SEQ ID NO. 30, COR-H2 as depicted in SEQ ID NO. 31 and COR-H3 as depicted in SEQ ID NO. 32;
(c) COR-H1 as depicted in SEQ ID NO. 48, COR-H2 as depicted in SEQ ID NO. 49 and COR-H3 as depicted in SEQ ID NO. 50;
(d) COR-H1 as depicted in SEQ ID NO. 66, COR-H2 as depicted in SEQ ID NO. 67 and COR-H3 as depicted in SEQ ID NO. 68;
(e) COR-H1 as depicted in SEQ ID NO. 84, COR-H2 as depicted in SEQ ID NO. 85 and COR-H3 as depicted in SEQ ID NO. 86;
(f) COR-H1 as depicted in SEQ ID NO. 102, COR-H2 as depicted in SEQ ID NO. 103 and COR-H3 as depicted in SEQ ID NO. 104;
(g) COR-H1 as depicted in SEQ ID NO. 120, COR-H2 as depicted in SEQ ID NO. 121 and COR-H3 as depicted in SEQ ID NO. 122;
(h) COR-H1 as depicted in SEQ ID NO. 138, COR-H2 as depicted in SEQ ID NO. 139 and COR-H3 as depicted in SEQ ID NO. 140;
(i) COR-H1 as depicted in SEQ ID NO. 156, COR-H2 as depicted in SEQ ID NO. 157 and COR-H3 as depicted in SEQ ID NO. 158; and
(j) COR-H1 as depicted in SEQ ID NO. 174, COR-H2 as depicted in SEQ ID NO. 175 and COR-H3 as depicted in SEQ ID NO. 176.

6. The bispecific single chain antibody molecule according to claim 1, wherein the first binding domain capable of binding to an epitope of human and non-chimpanzee primate CD3 chain comprises a VL region selected from the group consisting of a VL region as depicted in SEQ ID NO. 35, 39, 125, 129, 161 and 165.

7. The bispecific single chain antibody molecule according to claim 1, wherein the first binding domain capable of binding to an epitope of human and non-chimpanzee primate CD3 chain comprises a VH region selected from the group consisting of a VH region as depicted in SEQ ID NO. 15, 19, 33, 37, 51, 55, 69, 73, 87, 91, 105, 109, 123, 127, 141, 145, 159, 163, 177 and 181.

8. The bispecific single chain antibody molecule according to claim 1, wherein the first binding domain capable of binding to an epitope of human and non-chimpanzee primate CD3 chain comprises a VL region and a VH region selected from the group consisting of:
(a) a VL region as depicted in SEQ ID NO. 17 or 21 and a VH region as depicted in SEQ ID NO. 15 or 19;
(b) a VL region as depicted in SEQ ID NO. 35 or 39 and a VH region as depicted in SEQ ID NO. 33 or 37;
(c) a VL region as depicted in SEQ ID NO. 53 or 57 and a VH region as depicted in SEQ ID NO. 51 or 55;
(d) a VL region as depicted in SEQ ID NO. 71 or 75 and a VH region as depicted in SEQ ID NO. 69 or 73;
(e) a VL region as depicted in SEQ ID NO. 89 or 93 and a VH region as depicted in SEQ ID NO. 87 or 91;
(f) a VL region as depicted in SEQ ID NO. 07 or 111 and a VH region as depicted in SEQ ID NO. 105 or 109;
(g) a VL region as depicted in SEQ ID NO. 125 or 129 and a VH region as depicted in SEQ ID NO. 123 or 127;
(h) a VL region as depicted in SEQ ID NO. 143 or 147 and a VH region as depicted in SEQ ID NO. 141 or 145;
(i) a VL region as depicted in SEQ ID NO. 161 or 165 and a VH region as depicted in SEQ ID NO. 159 or 163; and
(j) a VL region as depicted in SEQ ID NO. 179 or 183 and a VH region as depicted in SEQ ID NO. 177 or 181.

9. The bispecific single chain antibody molecule according to claim 8, wherein the first binding domain capable of binding to an epitope of human and nonchimpanzee primate C03E chain comprises an amino acid sequence selected from the group consisting of SEQ ID NOs: 23, 25, 41, 43, 59, 61, 77, 79, 95, 97, 113, 115, 131, 133, 149, 151, 167, 169, 185 and 187.

10. The bispecific single chain antibody molecule according to claim 1, wherein the second binding domain is capable of binding to human PSMA and/or a non-Chimpanzee primate PSMA.

11. The bispecific single chain antibody molecule according to claim 10, wherein the bispecific single chain antibody molecule comprises a group of the following sequences as CDR H1, CDR H2, CDR H3, CDR L1, CDR L2 and CDR L3 in the second binding domain selected from the group consisting of:
a) CDR H1-3 of SEQ ID NO: 226-228 and CDR L1-3 of SEQ ID NO: 231233;
b) CDR H1-3 of SEQ ID NO: 240-242 and CDR L1-3 of SEQ ID NO: 245247;
c) CDR H1-3 of SEQ ID NO: 254-256 and CDR L1-3 of SEQ ID NO: 259261;
d) CDR H1-3 of SEQ ID NO: 268-270 and CDR L1-3 of SEQ ID NO: 273275;
e) CDR H1-3 of SEQ ID NO: 618-620 and CDR L1-3 of SEQ ID NO: 623-625;
f) CDR H1-3 of SEQ ID NO: 282-284 and CDR L1-3 of SEQ ID NO: 287289;
g) CDR H1-3 of SEQ ID NO: 296-298 and CDR L1-3 of SEQ ID NO: 301303;
h) CDR H1-3 of SEQ ID NO: 310-312 and CDR L1-3 of SEQ ID NO: 315317;
i) CDR H1-3 of SEQ ID NO: 324-326 and CDR L1-3 of SEQ ID NO: 329331;
j) CDR H1-3 of SEQ ID NO: 338-340 and CDR L1-3 of SEQ ID NO: 343-345;
k) CDR H1-3 of SEQ ID NO: 352-354 and CDR L1-3 of SEQ ID NO: 357359;
l) CDR H1-3 of SEQ ID NO: 366-368 and CDR L1-3 of SEQ ID NO: 371373;
m) CDR H1-3 of SEQ ID NO: 380-382 and CDR L1-3 of SEQ ID NO: 385387;
n) CDR H1-3 of SEQ ID NO: 394-396 and CDR L1-3 of SEQ ID NO: 399401;
o) CDR H1-3 of SEQ ID NO: 408-410 and CDR L1-3 of SEQ ID NO: 413-415;
p) CDR H1-3 of SEQ ID NO: 422-424 and CDR L1-3 of SEQ ID NO: 427-429;
q) CDR H1-3 of SEQ ID NO: 436-438 and CDR L1-3 of SEQ ID NO: 441-443;
r) CDR H1-3 of SEQ ID NO: 450-452 and CDR L1-3 of SEQ ID NO: 455-457;
s) CDR H1-3 of SEQ ID NO: 464-466 and CDR L1-3 of SEQ ID NO: 469-471;
t) CDR H1-3 of SEQ ID NO: 478-480 and CDR L1-3 of SEQ ID NO: 483-485;
u) CDR H1-3 of SEQ ID NO: 492-494 and CDR L1-3 of SEQ ID NO: 497-499;
v) CDR H1-3 of SEQ ID NO: 506-508 and CDR L1-3 of SEQ ID NO: 511-513;
w) CDR H1-3 of SEQ ID NO: 520-522 and CDR L1-3 of SEQ ID NO: 525-527;
x) CDR H1-3 of SEQ ID NO: 534-536 and CDR L1-3 of SEQ ID NO: 539-541;
y) CDR H1-3 of SEQ ID NO: 548-550 and CDR L1-3 of SEQ ID NO: 553-555;
z) CDR H1-3 of SEQ ID NO: 562-564 and CDR L1-3 of SEQ ID NO: 567-569;
aa) CDR H1-3 of SEQ ID NO: 576-578 and CDR L1-3 of SEQ ID NO: 581-583;
ab) CDR H1-3 of SEQ ID NO: 590-592 and CDR L1-3 of SEQ ID NO: 595-597; and
ac) CDR H1-3 of SEQ ID NO: 604-606 and CDR L1-3 of SEQ ID NO: 609-611.

12. The bispecific single chain antibody molecule of claim 11, wherein the binding domains are arranged in the order VH PSMA-VL PSMA-VH CD3-VL CD3 or VL PSMA-VH PSMA-VH CD3-VL CD3.

13. The bispecific single chain antibody molecule according to claim 12, wherein the bispecific single chain antibody molecule comprises a sequence selected from:
(a) an amino acid sequence as depicted in any of SEQ 10 NOs: 237, 251, 265, 279, 629, 293, 307, 321, 335, 349, 363, 377, 391, 405, 419, 433, 447, 461, 475, 489, 503, 517, 531, 545, 559, 573, 587, 601 or 615; and
(b) an amino acid sequence encoded by a nucleic acid sequence as depicted in any of SEQ 10 NOs: 238, 252, 266, 280, 630, 294, 308, 322, 336, 350, 364, 378, 392, 406, 420, 434, 448, 462, 476, 490, 504, 518, 532, 546, 560, 574, 588, 602 or 616.

14. A nucleic acid sequence encoding a bispecific single chain antibody molecule as defined in claim 1.

15. A vector, comprising a nucleic acid sequence as defined in claim 14.

16. The vector of claim 15, wherein said vector further comprises a regulatory sequence, which is operably linked to said nucleic acid sequence.

17. The vector of claim 16, wherein said vector is an expression vector.

18. A host transformed or transfected with the nucleic acid sequence of claim 14 or a vector comprising the nucleic acid sequence.

19. A process for the production of a bispecific single chain antibody molecule according to claim 1, said process comprising culturing a host transformed or transfected with a nucleic acid sequence encoding the bispecific single chain antibody molecule or with a vector comprising the nucleic acid sequence under conditions allowing the expression of the bispecific single chain antibody molecule and recovering the produced bispecific single chain antibody from the culture.

20.-23. (canceled)

24. A pharmaceutical composition comprising the bispecific single chain antibody molecule of claim 1 which, optionally further comprises suitable formulations of carriers, stabilizers and/or excipients.

25. The pharmaceutical composition of claim 24 suitable to be administered in combination with an additional drug.

26. The pharmaceutical composition of claim 25, wherein said drug is a non-proteinaceous compound or a proteinaceous compound.

27. The pharmaceutical composition of claim 26, wherein said proteinaceous compound or nonproteinaceous compound is administered simultaneously or nonsimultaneously with the bispecific single chain antibody molecule.

28. (canceled)

29. A method for the prevention, treatment or amelioration of a disease in a subject in the need thereof, said method comprising the step of administration of an effective amount of a pharmaceutical composition of claim 24.

30. The method of claim 29, wherein said disease is cancer.

31. The method of claim 30, wherein said cancer is a solid tumor, preferably a carcinoma or prostate cancer.

32. The method of claim 29, wherein said pharmaceutical composition is administered in combination with an additional drug.

33. The method of claim 32, wherein said drug is a non-proteinaceous compound or a proteinaceous compound.

34. The method of claim 33, wherein said proteinaceous compound or nonproteinaceous compound is administered simultaneously or nonsimultaneously with the pharmaceutical composition.

35. The method of claim 29, wherein said subject is a human.

36. A kit comprising a bispecific single chain antibody molecule as defined in claim 1, a nucleic acid molecule encoding the bispecific single chain antibody, a vector comprising the nucleic acid sequence, or a host transformed or transfected with the nucleic acid sequence or vector.
